(19) United States
(12) Patent Application Publication
(10) Pub. No.: US 2009/0298914 A1
(43) Pub. Date: Dec. 3, 2009

(54) RNA Interference Mediated Inhibition of Severe Acute Respiratory Syndrome (SARS) Virus Gene Expression Using Short Interfering Nucleic Acid (siNA)

(75) Inventor: James McSwiggen, Boulder, CO (US)

Correspondence Address: Sirna Therapeutics, Inc., 1700 Owens Street, 4th Floor, San Francisco, CA, 94158, US

(73) Assignee: Sirna Therapeutics, Inc., San Francisco, CA (US)

(21) Appl. No.: 12/272,682

(22) Filed: Nov. 17, 2008

Related U.S. Application Data
(63) Continuation of application No. 10/553,729, filed on Mar. 6, 2007.
Application No. 10/553,729 is a continuation-in-part of application No. 10/757,803, filed on Jan. 14, 2004.
Application No. 10/757,803 is a continuation-in-part of application No. 10/720,448, filed on Nov. 24, 2003.
Application No. 10/720,448 is a continuation-in-part of application No. 10/693,059, filed on Oct. 23, 2003.
Application No. 10/693,059 is a continuation-in-part of application No. 10/444,853, filed on May 23, 2003.
(60) Provisional application No. 60/462,874, filed on Apr. 15, 2003.

(51) Int. Cl. A61K 31/7105; C07H 21/02

(52) U.S. Cl. 514/44 A; 536/24.5

(57) ABSTRACT

The present invention comprises compounds, compositions, and methods useful for modulating the expression of genes associated with respiratory and pulmonary disease, such as severe acute respiratory syndrome (SARS) virus genes, using short interfering nucleic acid (siNA) molecules. This invention also comprises compounds, compositions, and methods useful for modulating the expression and activity of SARS virus genes, or other genes involved in pathways of SARS virus gene expression and/or activity by RNA interference (RNAi) using small nucleic acid molecules. In particular, the instant invention features small nucleic acid molecules, such as short interfering nucleic acid (siNA), short interfering RNA (siRNA), double-stranded RNA (dsRNA), micro-RNA (miRNA), and short hairpin RNA (shRNA) molecules and methods used to modulate the expression of SARS virus RNA.

[0001] This application is a continuation of U.S. patent application Ser. No. 10/553,729, filed on Mar. 6, 2007, which is a 371 of PCT/US04/11320, filed on Apr. 13, 2004, which claims priority from U.S. Provisional Application No. 60/462,874, filed Apr. 15, 2003; and parent U.S. patent application Ser. No. 10/553,729 is also a continuation-in-part of U.S. patent application Ser. No. 10/757,803, filed Jan. 14, 2004, which is a continuation-in part of U.S. patent application Ser. No. 10/720,448, filed Nov. 24, 2003, which is a continuation-in-part of U.S. patent application Ser. No. 10/693,059, filed Oct. 23, 2003, which is a continuation-in-part of U.S. patent application Ser. No. 10/444,853, filed May 23, 2003. The instant application claims the benefit of all the listed applications, which are hereby incorporated by reference herein in their entireties, including the drawings.

### SEQUENCE LISTING

[0002] The sequence listing submitted via EFS, in compliance with 37 CFR § 1.52(e)(5), is incorporated herein by reference. The sequence listing text file submitted via EFS contains the file “SequenceListing48USCNT”, created on Nov. 17, 2008, which is 805,515 bytes in size.

### FIELD OF THE INVENTION

[0003] The present invention concerns compounds, compositions, and methods for the study, diagnosis, and treatment of diseases and conditions that respond to the modulation of severe acute respiratory syndrome (SARS) associated cornavirus (SARS virus) gene expression and/or activity. The present invention also concerns compounds, compositions, and methods relating to conditions and diseases that respond to the modulation of expression and/or activity of genes involved in SARS virus pathways of gene expression, including cellular genes that are involved in SARS virus infection. Specifically, the invention comprises small nucleic acid molecules, such as short interfering nucleic acid (siNA), short interfering RNA (siRNA), double-stranded RNA (dsRNA), micro-RNA (miRNA), and short hairpin RNA (shRNA) molecules capable of mediating RNA interference (RNAi) against severe acute respiratory syndrome (SARS) associated cornavirus gene expression.

### BACKGROUND OF THE INVENTION

[0004] The following is a discussion of relevant art pertaining to RNAi. The discussion is provided only for understanding of the invention that follows. The summary is not an admission that any of the work described below is prior art to the claimed invention.

[0005] RNA interference refers to the process of sequence-specific post-transcriptional gene silencing in animals mediated by short interfering RNAs (siRNAs) (Zamore et al., 2000, Cell, 101, 25-33; Fire et al., 1998, Nature, 391, 806; Hamilton et al., 1999, Science, 286, 950-951; Lin et al., 1999, Nature, 402, 128-129; Sharp, 1999, Genes & Dev., 13:139-141; and Strauss, 1999, Science, 286, 886). The corresponding process in plants (Heifetz et al., International PCT Publication No. WO 99/61631) is commonly referred to as post-transcriptional gene silencing or RNA silencing and is also referred to as quelling in fungi. The process of post-transcriptional gene silencing is thought to be an evolutionarily-conserved cellular defense mechanism used to prevent the expression of foreign genes and is commonly shared by diverse flora and phyla (Fire et al., 1999, Trends Genet., 15, 358). Such protection from foreign gene expression may have evolved in response to the production of double-stranded RNAs (dsRNAs) derived from viral infection or from the random integration of transposon elements into a host genome via a cellular response that specifically destroys homologous single-stranded RNA or viral genomic RNA. The presence of dsRNA in cells triggers the RNAi response through a mechanism that has yet to be fully characterized. This mechanism appears to be different from other known mechanisms involving double-stranded RNA-specific ribonucleases, such as the interferon response that results from dsRNA-mediated activation of protein kinase PKR and 2′,5′-oligoadenylate synthetase resulting in non-specific cleavage of mRNA by ribonuclease L (see for example U.S. Pat. Nos. 6,107,094; 5,898,031; Clemens et al., 1997, J. Interferon & Cytokine Res., 17, 503-524; Adah et al., 2001, Curr. Med. Chem., 8, 1189).

[0006] The presence of long dsRNAs in cells stimulates the activity of a ribonuclease III enzyme referred to as dicer (Bass, 2000, Cell, 101, 235; Zamore et al., 2000, Cell, 101, 25-33; Hammond et al., 2000, Nature, 404, 293). Dicer is involved in the processing of the dsRNA into short pieces of dsRNA known as short interfering RNAs (siRNAs) (Zamore et al., 2000, Cell, 101, 25-33; Bass, 2000, Cell, 101, 235; Berstein et al., 2001, Nature, 409, 363). Short interfering RNAs derived from dicer activity are typically about 21 to about 23 nucleotides in length and comprise about 19 base pair duplexes (Zamore et al., 2000, Cell, 101, 25-33; Elbashir et al., 2001, Genes Dev., 15, 188). Dicer has also been implicated in the excision of 21 and 22-nucleotide small temporal RNAs (stRNAs) from precursor RNA of conserved structure that are implicated in translational control (Hutvagner et al., 2001, Science, 293, 834). The RNAi response also features an endonuclease complex, commonly referred to as an RNA-induced silencing complex (RISC), which mediates cleavage of single-stranded RNA having sequence complementary to the antisense strand of the siRNA duplex. Cleavage of the target RNA takes place in the middle of the region complementary to the antisense strand of the siRNA duplex (Elbashir et al., 2001, Genes Dev., 15, 188).

[0007] RNAi has been studied in a variety of systems. Fire et al., 1998, Nature, 391, 806, were the first to observe RNAi in C. elegans. Bahramian and Zarbl, 1999, Molecular and Cellular Biology, 19, 274-283 and Wianny and Goetz, 1999, Nature Cell Biol., 2, 70, describe RNAi mediated by dsRNA in mammalian systems. Hammond et al., 2000, Nature, 404, 293, describe RNAi in Drosophila cells transfected with dsRNA. Elbashir et al., 2001, Nature, 411, 494 and Tuschl et al., International PCT Publication No. WO 01/75164, describe RNAi induced by introduction of duplexes of synthetic 21-nucleotide RNAs in cultured mammalian cells including human embryonic kidney and HeLa cells. Recent work in Drosophila embryonic lysates (Elbashir et al., 2001, EMBO J., 20, 6877 and Tuschl et al., International PCT Publication No. WO 01/75164) has revealed certain requirements for siRNA length, structure, chemical composition, and sequence that are essential to mediate efficient RNAi activity. These studies have shown that 21-nucleotide siRNA duplexes are most active when containing 3′-terminal dinucleotide overhangs. Furthermore, complete substitution of one or both siRNA strands with 2′-deoxy (2′-H) or 2′-O-methyl nucleotides abolishes RNAi activity, whereas substitution of the 3′-terminal siRNA overhang nucleotides with 2′-deoxy nucleotides (2′-H) was shown to be tolerated. Single mismatch sequences in the center of the siRNA duplex were also shown to abolish RNAi activity. In addition, these studies also indicate that the position of the cleavage site in the target RNA is defined by the 5′-end of the siRNA guide sequence rather than the 3′-end of the guide sequence (Elbashir et al., 2001, EMBO J., 20, 6877). Other studies have indicated that a 5′-phosphate on the target-complementary strand of an siRNA duplex is required for siRNA activity and that ATP is utilized to maintain the 5′-phosphate moiety on the siRNA (Nykanen et al., 2001, Cell, 107, 309).

[0008] Studies have shown that replacing the 3′-terminal nucleotide overhanging segments of a 21-mer siRNA duplex having two-nucleotide 3′-overhangs with deoxyribonucleotides does not have an adverse effect on RNAi activity. Replacing up to four nucleotides on each end of the siRNA with deoxyribonucleotides has been reported to be well tolerated, whereas complete substitution with deoxyribonucleotides results in no RNAi activity (Elbashir et al., 2001, EMBO J., 20, 6877 and Tuschl et al., International PCT Publication No. WO 01/75164). In addition, Elbashir et al., supra, also report that substitution of siRNA with 2′-O-methyl nucleotides completely abolishes RNAi activity. Li et al., International PCT Publication No. WO 00/44914, and Beach et al., International PCT Publication No. WO 01/68836 preliminarily suggest that siRNA may include modifications to either the phosphate-sugar backbone or the nucleoside to include at least one of a nitrogen or sulfur heteroatom, however, neither application postulates to what extent such modifications would be tolerated in siRNA molecules, nor provides any further guidance or examples of such modified siRNA. Kreutzer et al., Canadian Patent Application No. 2,359,180, also describe certain chemical modifications for use in dsRNA constructs in order to counteract activation of double-stranded RNA-dependent protein kinase PKR, specifically 2′-amino or 2′-O-methyl nucleotides, and nucleotides containing a 2′-O or 4′-C methylene bridge. However, Kreutzer et al. similarly fails to provide examples or guidance as to what extent these modifications would be tolerated in dsRNA molecules.

[0009] Parrish et al., 2000, Molecular Cell, 6, 1077-1087, tested certain chemical modifications targeting the unc-22 gene in C. elegans using long (>25 nt) siRNA transcripts. The authors describe the introduction of thiophosphate residues into these siRNA transcripts by incorporating thiophosphate nucleotide analogs with T7 and T3 RNA polymerase and observed that RNAs with two phosphorothioate modified bases also had substantial decreases in effectiveness as RNAi. Further, Parrish et al. reported that phosphorothioate modification of more than two residues greatly destabilized the RNAs in vitro such that interference activities could not be assayed. Id. at 1081. The authors also tested certain modifications at the 2′-position of the nucleotide sugar in the long siRNA transcripts and found that substituting deoxynucleotides for ribonucleotides produced a substantial decrease in interference activity, especially in the case of Uridine to Thymidine and/or Cytidine to deoxy-Cytidine substitutions. Id. In addition, the authors tested certain base modifications, including substituting, in sense and antisense strands of the siRNA, 4-thiouracil, 5-bromouracil, 5-iodouracil, and 3-(aminoallyl)uracil for uracil, and inosine for guanosine. Whereas 4-thiouracil and 5-bromouracil substitution appeared to be tolerated, Parrish reported that inosine produced a substantial decrease in interference activity when incorporated in either strand. Parrish also reported that incorporation of 5-iodouracil and 3-(aminoallyl)uracil in the antisense strand resulted in a substantial decrease in RNAi activity as well.

[0010] The use of longer dsRNA has been described. For example, Beach et al., International PCT Publication No. WO 01/68836, describes specific methods for attenuating gene expression using endogenously-derived dsRNA. Tuschl et al., International PCT Publication No. WO 01/75164, describe a Drosophila in vitro RNAi system and the use of specific siRNA molecules for certain functional genomic and certain therapeutic applications; although Tuschl, 2001, Chem. Biochem., 2, 239-245, doubts that RNAi can be used to cure genetic diseases or viral infection due to the danger of activating interferon response. Li et al., International PCT Publication No. WO 00/44914, describe the use of specific long (141 bp-488 bp) enzymatically synthesized or vector expressed dsRNAs for attenuating the expression of certain target genes. Zernicka-Goetz et al., International PCT Publication No. WO 01/36646, describe certain methods for inhibiting the expression of particular genes in mammalian cells using certain long (550 bp-714 bp), enzymatically synthesized or vector expressed dsRNA molecules. Fire et al., International PCT Publication No. WO 99/32619, describe particular methods for introducing certain long dsRNA molecules into cells for use in inhibiting gene expression in nematodes. Plaetinck et al., International PCT Publication No. WO 00/01846, describe certain methods for identifying specific genes responsible for conferring a particular phenotype in a cell using specific long dsRNA molecules. Mello et al., International PCT Publication No. WO 01/29058, describe the identification of specific genes involved in dsRNA-mediated RNAi. Pachuck et al., International PCT Publication No. WO 00/63364, describe certain long (at least 200 nucleotide) dsRNA constructs. Deschamps Depaillette et al., International PCT Publication No. WO 99/07409, describe specific compositions consisting of particular dsRNA molecules combined with certain anti-viral agents. Waterhouse et al., International PCT Publication No. 99/53050 and 1998, PNAS, 95, 13959-13964, describe certain methods for decreasing the phenotypic expression of a nucleic acid in plant cells using certain dsRNAs. Driscoll et al., International PCT Publication No. WO 01/49844, describe specific DNA expression constructs for use in facilitating gene silencing in targeted organisms.

[0011] Others have reported on various RNAi and gene-silencing systems. For example, Parrish et al., 2000, Molecular Cell, 6, 1077-1087, describe specific chemically modified dsRNA constructs targeting the unc-22 gene of C. elegans. Grossniklaus, International PCT Publication No. WO 01/38551, describes certain methods for regulating polycomb gene expression in plants using certain dsRNAs. Churikov et al., International PCT Publication No. WO 01/42443, describe certain methods for modifying genetic characteristics of an organism using certain dsRNAs. Cogoni et al., International PCT Publication No. WO 01/53475, describe certain methods for isolating a Neurospora silencing gene and uses thereof. Reed et al., International PCT Publication No. WO 01/68836, describe certain methods for gene silencing in plants. Honer et al., International PCT Publication No. WO 01/70944, describe certain methods of drug screening using transgenic nematodes as Parkinson's Disease models using certain dsRNAs. Deak et al., International PCT Publication No. WO 01/72774, describe certain Drosophila-derived gene products that may be related to RNAi in Drosophila. Arndt et al., International PCT Publication No. WO 01/92513 describe certain methods for mediating gene suppression by using factors that enhance RNAi. Tuschl et al., International PCT Publication No. WO 02/44321, describe certain synthetic siRNA constructs. Pachuk et al., International PCT Publication No. WO 00/63364, and Satishchandran et al., International PCT Publication No. WO 01/04313, describe certain methods and compositions for inhibiting the function of certain polynucleotide sequences using certain long (over 250 bp), vector expressed dsRNAs. Echeverri et al., International PCT Publication No. WO 02/38805, describe certain C. elegans genes identified via RNAi. Kreutzer et al. International PCT Publications Nos. WO 02/055692, WO 02/055693, and EP 1144623 B1 describes certain methods for inhibiting gene expression using dsRNA. Graham et al., International PCT Publications Nos. WO 99/49029 and WO 01/70949, and AU 4037501 describe certain vector expressed siRNA molecules. Fire et al., U.S. Pat. No. 6,506,559, describe certain methods for inhibiting gene expression in vitro using certain long dsRNA (299 bp-1033 bp) constructs that mediate RNAi. Martinez et al., 2002, Cell, 110, 563-574, describe certain single-stranded siRNA constructs, including certain 5′-phosphorylated single-stranded siRNAs that mediate RNA interference in HeLa cells. Harborth et al., 2003, Antisense & Nucleic Acid Drug Development, 13, 83-105, describe certain chemically and structurally modified siRNA molecules. Chiu and Rana, 2003, RNA, 9, 1034-1048, describe certain chemically and structurally modified siRNA molecules.

[0012] McCaffrey et al., 2002, Nature, 418, 38-39, describes the use of certain siRNA constructs targeting a chimeric SARS NS5B protein/luciferase transcript in mice.

[0013] Randall et al., 2003, PNAS USA, 100, 235-240, describe certain siRNA constructs targeting SARS RNA in Huh7 hepatoma cell lines.

### SUMMARY OF THE INVENTION

[0014] This invention comprises compounds, compositions, and methods useful for modulating the expression of genes associated with the development or maintenance of SARS virus infection, acute respiratory failure, viral pneumonia, and/or other disease states associated with SARS virus infection, using short interfering nucleic acid (siNA) molecules. This invention also comprises compounds, compositions, and methods useful for modulating the expression and activity of severe acute respiratory syndrome (SARS) associated cornavirus or genes involved in severe acute respiratory syndrome (SARS) associated cornavirus gene expression and/or activity by RNA interference (RNAi) using small nucleic acid molecules. In particular, the instant invention features small nucleic acid molecules, such as short interfering nucleic acid (siNA), short interfering RNA (siRNA), double-stranded RNA (dsRNA), micro-RNA (miRNA), and short hairpin RNA (shRNA) molecules and methods used to modulate the expression of severe acute respiratory syndrome (SARS) associated cornavirus. For convenience, all forms of the small nucleic acid molecules of the invention (e.g., siRNA, dsRNA, micro-RNA, etc.) are referred to herein as “siNA,” unless expressly stated otherwise.

[0015] An siNA of the invention can be unmodified or chemically modified. An siNA of the instant invention can be chemically synthesized, expressed from a vector or enzymatically synthesized. The instant invention also features various chemically modified synthetic short interfering nucleic acid (siNA) molecules capable of modulating repeat expansion gene expression or activity in cells by RNA interference (RNAi). The use of chemically modified siNA improves various properties of native siNA molecules through increased resistance to nuclease degradation in vivo and/or through improved cellular uptake. Further, contrary to earlier published studies, siNA having multiple chemical modifications retains its RNAI activity. The siNA molecules of the instant invention are useful reagents and are useful in methods for a variety of therapeutic, diagnostic, target validation, genomic discovery, genetic engineering, and pharmacogenomic applications.

[0016] In one embodiment, the invention comprises one or more siNA molecules (and methods of using them) that independently or in combination modulate the expression of gene(s) encoding SARS virus. Specifically, the present invention comprises siNA molecules that modulate the expression of SARS proteins, for example, proteins encoded by SARS virus genome, such as Genbank Accession Nos. in Table I.

[0017] In one embodiment, the invention comprises one or more siNA molecules (and methods of using them) that independently or in combination modulate the expression of genes representing cellular targets for SARS virus infection, such as cellular receptors, cell surface molecules, cellular enzymes, cellular transcription factors, and/or cytokines, second messengers, and cellular accessory molecules.

[0018] Due to the high sequence variability of the SARS genome, selection of siNA molecules for broad therapeutic applications preferably involve the conserved regions of the SARS genome. In one embodiment, the present invention comprises siNA molecules that target the conserved regions of the SARS genome, such as the polymerase encoding region of the SARS virus genomic RNA. Therefore, siNA molecules of the invention are designed to target all the different isolates of SARS. siNA molecules designed to target conserved regions of various SARS isolates enable efficient inhibition of SARS replication in diverse patient populations and ensure the effectiveness of the siNA molecules against SARS quasi species that evolve due to mutations in the non-conserved regions of the SARS genome. Therefore, a single siNA molecule can be targeted against all isolates of SARS by designing the siNA molecule to interact with conserved nucleotide sequences of SARS (such conserved sequences are expected to be present in the RNA of all SARS isolates).

[0019] In one embodiment, an siNA molecule is designed to target the 3′-untranslated region and/or the shared leader sequence of genomic SARS RNA transcripts. Because SARS cornavirus mRNAs are nested with the genomic RNA and share common 3′ region and polyA region, a single siNA targeting the 3′-end can target all transcripts plus the genomic RNA.

[0020] In one embodiment, an siNA molecule of the invention targets both the plus (genomic) strand RNA and minus strand RNA of the SARS virus. Because the SARS virus generates a minus strand RNA from plus strand genomic RNA, a double-stranded siNA molecule targeting the plus strand will also target the minus strand, thus allowing a single double-stranded siNA to target both the plus (genomic) and the minus strand of the SARS virus. For example, a double-stranded siNA molecule targeting the 3′-end of the SARS virus genomic strand will also target the 3′-end of the minus strand, thus allowing a single double-stranded siNA to target both the plus and the minus strand of the SARS virus.

[0021] In one embodiment, the invention comprises one or more siNA molecules (and methods of using them) that independently or in combination modulate the expression of gene(s) encoding SARS virus and/or cellular proteins associated with the maintenance or development of SARS virus infection and/or acute respiratory failure, viral pneumonia, such as genes encoding sequences comprising those sequences referred to by GenBank Accession Nos. shown in Table I, referred to herein generally as SARS. The description below of the various aspects and embodiments of the invention is provided with reference to exemplary severe acute respiratory syndrome (SARS) associated comavirus genes, generally referred to herein as SARS. However, such reference is meant to be exemplary only and the various aspects and embodiments of the invention are also directed to other genes that express alternate SARS genes, such as mutant SARS genes, splice variants of SARS genes, and genes encoding different strains of SARS, as well as cellular targets for SARS, such as those described herein. The various aspects and embodiments are also directed to other genes involved in SARS pathways, including genes that encode cellular proteins involved in the maintenance and/or development of SARS virus infection and/or acute respiratory failure or other genes that express other proteins associated with SARS virus infection, such as cellular proteins that are utilized in the SARS life-cycle. Such additional genes can be analyzed for target sites using the methods described herein for SARS. Thus, the inhibition and the effects of such inhibition of the other genes can be performed as described herein. In other words, the term “SARS” as it is defined herein below and recited in the described embodiments, is meant to encompass genes associated with the development or maintenance of SARS virus infection, such as genes which encode SARS polypeptides, including polypeptides of different strains of SARS, mutant SARS genes, and splice variants of SARS genes, as well as cellular genes involved in SARS pathways of gene expression, replication, and/or SARS activity. Also, the term “SARS” as it is defined herein and recited in the described embodiments, is meant to encompass SARS viral gene products and cellular gene products involved in SARS virus infection, such as those described herein. Thus, each of the embodiments described herein with reference to the term “SARS” are applicable to all of the virus, cellular and viral protein, peptide, polypeptide, and/or polynucleotide molecules covered by the term “SARS” as that term is defined herein.

[0022] In one embodiment, the invention features a double-stranded short interfering nucleic acid (siNA) molecule that down-regulates expression of a severe acute respiratory syndrome virus (e.g., SARS) gene, wherein said siNA molecule comprises about 19 to about 23 base pairs. Preferably the number of based pairs in the siNA molecule is 18, 19, 20, 21, 22, 23, or 24.

[0023] In one embodiment, the invention features an siNA molecule that down-regulates expression of a SARS gene, for example, wherein the SARS gene comprises SARS encoding sequence. In one embodiment, the invention features an siNA molecule that down-regulates expression of a SARS gene, for example, wherein the SARS gene comprises SARS non-coding sequence or regulatory elements involved in SARS gene expression.

[0024] In one embodiment, the invention features an siNA molecule having RNAi activity against SARS RNA, wherein the siNA molecule comprises a sequence complementary to any RNA having SARS encoding sequence, such as those sequences having GenBank Accession Nos. shown in Table I. In another embodiment, the invention features an siNA molecule having RNAi activity against SARS RNA, wherein the siNA molecule comprises a sequence complementary to an RNA having other SARS encoding sequence, for example other mutant SARS genes not shown in Table I but known in the art to be associated with respiratory and/or pulmonary disease, SARS virus infection and/or acute respiratory failure, viral pneumonia, impeded respiration, respiratory distress syndrome, pulmonary hypertension, or pulmonary vasoconstriction. Chemical modifications as shown in Tables III and IV or otherwise described herein can be applied to any siNA construct of the invention. In another embodiment, an siNA molecule of the invention includes nucleotide sequence that can interact with nucleotide sequence of a SARS gene and thereby mediate silencing of SARS gene expression, for example, wherein the siNA mediates regulation of SARS gene expression by cellular processes that modulate the chromatin structure of the SARS gene and prevent transcription of the SARS gene.

[0025] In another embodiment, the invention features an siNA molecule comprising nucleotide sequence, for example, nucleotide sequence in the antisense region of the siNA molecule that is complementary to a nucleotide sequence or portion of sequence of a SARS gene. In another embodiment, the invention features an siNA molecule comprising a region, for example, the antisense region of the siNA construct, complementary to a sequence comprising a SARS gene sequence or a portion thereof.

[0026] In one embodiment, the antisense region of SARS siNA constructs can comprise a sequence complementary to sequence having any of SEQ ID NOs. 1-1651 or 3303-3318. In one embodiment, the antisense region can also comprise sequence having any of SEQ ID NOs. 1652-3302, 3319-3326, 3335-3342, 3351-3358, 3367-3374, 3376, 3378, 3380, 3383, 3385, 3387, 3389, or 3392. In another embodiment, the sense region of the SARS constructs can comprise sequence having any of SEQ ID NOs. 1-1651, 3303-3310, 3311-3318, 3327-3334, 3343-3350, 3359-3366, 3375, 3377, 3379, 3381, 3382, 3384, 3386, 3388, 3390, or 3391.

[0027] In one embodiment, an siNA molecule of the invention comprises any of SEQ ID NOs. 1-3392. The sequences shown in SEQ ID NOs: 1-3392 are not limiting. An siNA molecule of the invention can comprise any contiguous SARS sequence (e.g., about 19 to about 25, or about 19, 20, 21, 22, 23, 24 or 25 contiguous SARS nucleotides).

[0028] In yet another embodiment, the invention features an siNA molecule comprising a sequence, for example, the antisense sequence of the siNA construct, complementary to a sequence or portion of sequence comprising sequence represented by GenBank Accession Nos. shown in Table I. Chemical modifications in Tables III and IV and described herein can be applied to any siNA construct of the invention. siNA molecules of the invention are unmodified or have up to all nucleotides modified with modifications according to Tables III and IV.

[0029] In one embodiment of the invention an siNA molecule comprises an antisense strand having about 19 to about 29 (e.g., 18, 19, 20, 21, 22, 23, 24, 25, 26, 27, 28, 29, or 30) nucleotides, wherein the antisense strand is complementary to a RNA sequence encoding a SARS protein, and wherein said siNA further comprises a sense strand having about 19 to about 29 (e.g., 18, 19, 20, 21, 22, 23, 24, 25, 26, 27, 28, 29, or 30) nucleotides, and wherein said sense strand and said antisense strand are distinct nucleotide sequences with at least about 19 complementary nucleotides.

[0030] In another embodiment of the invention an siNA molecule of the invention comprises an antisense region having about 19 to about 29 (e.g., 18, 19, 20, 21, 22, 23, 24, 25, 26, 27, 28, 29, or 30) nucleotides, wherein the antisense region is complementary to a RNA sequence encoding a SARS protein, and wherein said siNA further comprises a sense region having about 19 to about 29 (e.g., 18, 19, 20, 21, 22, 23, 24, 25, 26, 27, 28, 29 or more) nucleotides, wherein said sense region and said antisense region comprise a linear molecule with at least about 19 complementary nucleotides.

[0031] In one embodiment of the invention an siNA molecule comprises an antisense strand comprising a nucleotide sequence that is complementary to a nucleotide sequence or a portion thereof encoding a SARS protein. The siNA further comprises a sense strand, wherein said sense strand comprises a nucleotide sequence of a SARS gene or a portion thereof.

[0032] In another embodiment, an siNA molecule comprises an antisense region comprising a nucleotide sequence that is complementary to a nucleotide sequence encoding a SARS protein or a portion thereof. The siNA molecule further comprises a sense region, wherein said sense region comprises a nucleotide sequence of a SARS gene or a portion thereof.

[0033] In one embodiment, an siNA molecule of the invention has RNAi activity that modulates expression of RNA encoded by a SARS gene. Because SARS genes can share some degree of sequence homology with each other, siNA molecules can be designed to target a class of SARS genes or alternately specific SARS genes by selecting sequences that are either shared among different SARS targets (e.g., different viral strains) or alternatively that are unique.for a specific SARS target (e.g., a particular viral strain). Therefore, in one embodiment, the siNA molecule can be designed to target conserved regions of SARS RNA sequences having homology among several SARS genes so as to target several SARS genes (e.g., different SARS isoforms, splice variants, mutant genes etc.) with one siNA molecule. In another embodiment, the siNA molecule can be designed to target a sequence that is unique to a specific SARS RNA sequence due to the high degree of specificity that the siNA molecule requires to mediate RNAi activity.

[0034] In one embodiment, nucleic acid molecules of the invention that act as mediators of the RNA interference gene silencing response are double-stranded nucleic acid molecules. In another embodiment, the siNA molecules of the invention consist of duplexes containing about 19 base pairs between oligonucleotides comprising about 19 to about 25 (e.g., 18, 19, 20, 21, 22, 23, 24, 25, or 26) nucleotides. In yet another embodiment, siNA molecules of the invention comprise duplexes with overhanging ends of about 1 to about 3 (e.g., 1, 2, 3, or 4) nucleotides, for example, about 21-nucleotide duplexes with about 19 base pairs and 3′-terminal mononucleotide, dinucleotide, or trinucleotide overhangs.

[0035] In one embodiment, the invention features one or more chemically modified siNA constructs having specificity for SARS expressing nucleic acid molecules, such as RNA encoding a SARS protein. Non-limiting examples of such chemical modifications include without limitation phosphorothioate internucleotide linkages, 2′-deoxyribonucleotides, 2′-O-methyl ribonucleotides, 2′-deoxy-2′-fluoro ribonucleotides, “universal base” nucleotides, “acyclic” nucleotides, 5-C-methyl nucleotides, and terminal glyceryl and/or inverted deoxy abasic residue incorporation. These chemical modifications, when used in various siNA constructs, are shown to preserve RNAi activity in cells while at the same time, dramatically increasing the serum stability of these compounds. Furthermore, contrary to the data published by Parrish et al., supra, applicant demonstrates that multiple (greater than one) phosphorothioate substitutions are well-tolerated and confer substantial increases in serum stability for modified siNA constructs.

[0036] In one embodiment, an siNA molecule of the invention comprises modified nucleotides while maintaining the ability to mediate RNAi. The modified nucleotides can be used to improve in vitro or in vivo characteristics such as stability, activity, and/or bioavailability. For example, an siNA molecule of the invention can comprise modified nucleotides as a percentage of the total number of nucleotides present in the siNA molecule. As such, an siNA molecule of the invention can generally comprise about 5% to about 100% modified nucleotides (e.g., 5%, 10%, 15%, 20%, 25%, 30%, 35%, 40%, 45%, 50%, 55%, 60%, 65%, 70%, 75%, 80%, 85%, 90%, 95% or 100% modified nucleotides). The actual percentage of modified nucleotides present in a given siNA molecule will depend on the total number of nucleotides present in the siNA. If the siNA molecule is single-stranded, the percent modification can be based upon the total number of nucleotides present in the single-stranded siNA molecules. Likewise, if the siNA molecule is double-stranded, the percent modification can be based upon the total number of nucleotides present in the sense strand, antisense strand, or both the sense and antisense strands.

[0037] One aspect of the invention features a double-stranded short interfering nucleic acid (siNA) molecule that down-regulates expression of a SARS gene. In one embodiment, a double-stranded siNA molecule comprises one or more chemical modifications and each strand of the double-stranded siNA is about 21 nucleotides long. In one embodiment, the double-stranded siNA molecule does not contain any ribonucleotides. In another embodiment, the double-stranded siNA molecule comprises one or more ribonucleotides. In one embodiment, each strand of the double-stranded siNA molecule comprises about 19 to about 23 (e.g., about 19, 20, 21, 22, 23, 24, 25, 26, 27, 28, or 29) nucleotides, wherein each strand comprises about 19 nucleotides that are complementary to the nucleotides of the other strand. In one embodiment, one of the strands of the double-stranded siNA molecule comprises a nucleotide sequence that is complementary to a nucleotide sequence or a portion thereof of the SARS gene, and the second strand of the double-stranded siNA molecule comprises a nucleotide sequence substantially similar to the nucleotide sequence of the SARS gene or a portion thereof.

[0038] In another embodiment, the invention features a double-stranded short interfering nucleic acid (siNA) molecule that down-regulates expression of a SARS gene comprising an antisense region, wherein the antisense region comprises a nucleotide sequence that is complementary to a nucleotide sequence of the SARS gene or a portion thereof, and a sense region, wherein the sense region comprises a nucleotide sequence substantially similar to the nucleotide sequence of the SARS gene or a portion thereof. In one embodiment, the antisense region and the sense region each comprise about 19 to about 23 (e.g. about 19, 20, 21, 22, or 23) nucleotides, wherein the antisense region comprises about 19 nucleotides that are complementary to nucleotides of the sense region.

[0039] In another embodiment, the invention features a double-stranded short interfering nucleic acid (siNA) molecule that down-regulates expression of a SARS gene comprising a sense region and an antisense region, wherein the antisense region comprises a nucleotide sequence that is complementary to a nucleotide sequence of RNA encoded by the SARS gene or a portion thereof and the sense region comprises a nucleotide sequence that is complementary to the antisense region.

[0040] In one embodiment, the SARS virus RNA contemplated by the invention comprises SARS virus minus strand RNA. In another embodiment, the SARS virus RNA contemplated by the invention comprises SARS virus plus strand RNA.

[0041] In one embodiment, an siNA molecule of the invention comprises blunt ends, i.e., ends that do not include any overhanging nucleotides. For example, an siNA molecule of the invention comprising modifications described herein (e.g., comprising nucleotides having Formulae I-VII or siNA constructs comprising StabOO-Stab22 or any combination thereof (see Table IV)) and/or any length described herein can comprise blunt ends or ends with no overhanging nucleotides.

[0042] In one embodiment, any siNA molecule of the invention can comprise one or more blunt ends, i.e., where a blunt end does not have any overhanging nucleotides. In a non-limiting example, a blunt ended siNA molecule has a number of base pairs equal to the number of nucleotides present in each strand of the siNA molecule. In another example, an siNA molecule comprises one blunt end, for example wherein the 5′-end of the antisense strand and the 3′-end of the sense strand do not have any overhanging nucleotides. In another example, an siNA molecule comprises one blunt end, for example wherein the 3′-end of the antisense strand and the 5′-end of the sense strand do not have any overhanging nucleotides. In another example, an siNA molecule comprises two blunt ends, for example wherein the 3′-end of the antisense strand and the 5′-end of the sense strand as well as the 5′-end of the antisense strand and 3′-end of the sense strand do not have any overhanging nucleotides. A blunt ended siNA molecule can comprise, for example, from about 18 to about 30 nucleotides (e.g., about 18, 19, 20, 21, 22, 23, 24, 25, 26, 27, 28, 29, or 30 nucleotides). Other nucleotides present in a blunt ended siNA molecule can comprise mismatches, bulges, loops, or wobble base pairs, for example, to modulate the activity of the siNA molecule to mediate RNA interference.

[0043] By “blunt ends” is meant symmetric termini or termini of a double-stranded siNA molecule having no overhanging nucleotides. The two strands of a double-stranded siNA molecule align with each other without over-hanging nucleotides at the termini. For example, a blunt ended siNA construct comprises terminal nucleotides that are complementary between the sense and antisense regions of the siNA molecule.

[0044] In one embodiment, the invention features a double-stranded short interfering nucleic acid (siNA) molecule that down-regulates expression of a SARS gene, wherein the siNA molecule is assembled from two separate oligonucleotide fragments wherein one fragment comprises the sense region and the second fragment comprises the antisense region of the siNA molecule. The sense region can be connected to the antisense region via a linker molecule, such as a polynucleotide linker or a non-nucleotide linker.

[0045] In one embodiment, the invention features double-stranded short interfering nucleic acid (siNA) molecule that down-regulates expression of a SARS gene, wherein the siNA molecule comprises about 19 to about 21 base pairs, and wherein each strand of the siNA molecule comprises one or more chemical modifications. In another embodiment, one of the strands of the double-stranded siNA molecule comprises a nucleotide sequence that is complementary to a nucleotide sequence of a SARS gene or a portion thereof, and the second strand of the double-stranded siNA molecule comprises a nucleotide sequence substantially similar to the nucleotide sequence or a portion thereof of the SARS gene. In another embodiment, one of the strands of the double-stranded siNA molecule comprises a nucleotide sequence that is complementary to a nucleotide sequence of a SARS gene or a portion thereof, and the second strand of the double-stranded siNA molecule comprises a nucleotide sequence substantially similar to the nucleotide sequence or a portion thereof of the SARS gene. In another embodiment, each strand of the siNA molecule comprises about 19 to about 23 nucleotides, and each strand comprises at least about 19 nucleotides that are complementary to the nucleotides of the other strand. The SARS gene can comprise, for example, sequences referred to Table I.

[0046] In one embodiment, an siNA molecule of the invention comprises no ribonucleotides. In another embodiment, an siNA molecule of the invention comprises ribonucleotides.

[0047] In one embodiment, an siNA molecule of the invention comprises an antisense region comprising a nucleotide sequence that is complementary to a nucleotide sequence of a SARS gene or a portion thereof, and the siNA further comprises a sense region comprising a nucleotide sequence substantially similar to the nucleotide sequence of the SARS gene or a portion thereof. In another embodiment, the antisense region and the sense region each comprise about 19 to about 23 nucleotides and the antisense region comprises at least about 19 nucleotides that are complementary to nucleotides of the sense region. The SARS gene can comprise, for example, sequences referred to Table I.

[0048] In one embodiment, an siNA molecule of the invention comprises a sense region and an antisense region, wherein the antisense region comprises a nucleotide sequence that is complementary to a nucleotide sequence of RNA encoded by a SARS gene, or a portion thereof, and the sense region comprises a nucleotide sequence that is complementary to the antisense region. In another embodiment, the siNA molecule is assembled from two separate oligonucleotide fragments, wherein one fragment comprises the sense region and the second fragment comprises the antisense region of the siNA molecule. In another embodiment, the sense region is connected to the antisense region via a linker molecule. In another embodiment, the sense region is connected to the antisense region via a linker molecule, such as a nucleotide or non-nucleotide linker. The SARS gene can comprise, for example, sequences referred to Table I.

[0049] In one embodiment, the invention features a double-stranded short interfering nucleic acid (siNA) molecule that down-regulates expression of a SARS gene comprising a sense region and an antisense region, wherein the antisense region comprises a nucleotide sequence that is complementary to a nucleotide sequence of RNA encoded by the SARS gene or a portion thereof and the sense region comprises a nucleotide sequence that is complementary to the antisense region, and wherein the siNA molecule has one or more modified pyrimidine and/or purine nucleotides. In one embodiment, the pyrimidine nucleotides in the sense region are 2′-O-methylpyrimidine nucleotides or 2′-deoxy-2′-fluoro pyrimidine nucleotides and the purine nucleotides present in the sense region are 2′-deoxy purine nucleotides. In another embodiment, the pyrimidine nucleotides in the sense region are 2′-deoxy-2′-fluoro pyrimidine nucleotides and the purine nucleotides present in the sense region are 2′-O-methyl purine nucleotides. In another embodiment, the pyrimidine nucleotides in the sense region are 2′-deoxy-2′-fluoro pyrimidine nucleotides and the purine nucleotides present in the sense region are 2′-deoxy purine nucleotides. In one embodiment, the pyrimidine nucleotides in the antisense region are 2′-deoxy-2′-fluoro pyrimidine nucleotides and the purine nucleotides present in the antisense region are 2′-O-methyl or 2′-deoxy purine nucleotides. In another embodiment of any of the above-described siNA molecules, any nucleotides present in a non-complementary region of the sense strand (e.g. overhang region) are 2′-deoxy nucleotides.

[0050] In one embodiment, the invention features a double-stranded short interfering nucleic acid (siNA) molecule that down-regulates expression of a SARS gene, wherein the siNA molecule is assembled from two separate oligonucleotide fragments wherein one fragment comprises the sense region and the second fragment comprises the antisense region of the siNA molecule, and wherein the fragment comprising the sense region includes a terminal cap moiety at the 5′-end, the 3′-end, or both of the 5′ and 3′ ends of the fragment. In another embodiment, the terminal cap moiety is an inverted deoxy abasic moiety or glyceryl moiety. In another embodiment, each of the two fragments of the siNA molecule comprise about 21 nucleotides.

[0051] In one embodiment, the invention features an siNA molecule comprising at least one modified nucleotide, wherein the modified nucleotide is a 2′-deoxy-2′-fluoro nucleotide. The siNA can be, for example, of length between about 12 and about 36 nucleotides. In another embodiment, all pyrimidine nucleotides present in the siNA are 2′-deoxy-2′-fluoro pyrimidine nucleotides. In another embodiment, the modified nucleotides in the siNA include at least one 2′-deoxy-2′-fluoro cytidine or 2′-deoxy-2′-fluoro uridine nucleotide. In another embodiment, the modified nucleotides in the siNA include at least one 2′-deoxy-2′-fluoro cytidine and at least one 2′-deoxy-2′-fluoro uridine nucleotides. In another embodiment, all uridine nucleotides present in the siNA are 2′-deoxy-2′-fluoro uridine nucleotides. In another embodiment, all cytidine nucleotides present in the siNA are 2′-deoxy-2′-fluoro cytidine nucleotides. In another embodiment, all adenosine nucleotides present in the siNA are 2′-deoxy-2′-fluoro adenosine nucleotides. In another embodiment, all guanosine nucleotides present in the siNA are 2′-deoxy-2′-fluoro guanosine nucleotides. The siNA can further comprise at least one modified internucleotidic linkage, such as phosphorothioate linkage. In another embodiment, the 2′-deoxy-2′-fluoronucleotides are present at specifically selected locations in the siNA that are sensitive to cleavage by ribonucleases, such as locations having pyrimidine nucleotides.

[0052] In one embodiment, the invention features a method of increasing the stability of an siNA molecule against cleavage by ribonucleases comprising introducing at least one modified nucleotide into the siNA molecule, wherein the modified nucleotide is a 2′-deoxy-2′-fluoro nucleotide. In another embodiment, all pyrimidine nucleotides present in the siNA are 2′-deoxy-2′-fluoro pyrimidine nucleotides. In another embodiment, the modified nucleotides in the siNA include at least one 2′-deoxy-2′-fluoro cytidine or 2′-deoxy-2′-fluoro uridine nucleotide. In another embodiment, the modified nucleotides in the siNA include at least one 2′-deoxy-2′-fluoro cytidine and at least one 2′-deoxy-2′-fluoro uridine nucleotides. In another embodiment, all uridine nucleotides present in the siNA are 2′-deoxy-2′-fluoro uridine nucleotides. In another embodiment, all cytidine nucleotides present in the siNA are 2′-deoxy-2′-fluoro cytidine nucleotides. In another embodiment, all adenosine nucleotides present in the siNA are 2′-deoxy-2′-fluoro adenosine nucleotides. In another embodiment, all guanosine nucleotides present in the siNA are 2′-deoxy-2′-fluoro guanosine nucleotides. The siNA can further comprise at least one modified internucleotidic linkage, such as phosphorothioate linkage. In another embodiment, the 2′-deoxy-2′-fluoronucleotides are present at specifically selected locations in the siNA that are sensitive to cleavage by ribonucleases, such as locations having pyrimidine nucleotides.

[0053] In one embodiment, the invention features a double-stranded short interfering nucleic acid (siNA) molecule that down-regulates expression of a SARS gene comprising a sense region and an antisense region, wherein the antisense region comprises a nucleotide sequence that is complementary to a nucleotide sequence of RNA encoded by the SARS gene or a portion thereof and the sense region comprises a nucleotide sequence that is complementary to the antisense region, and wherein the purine nucleotides present in the antisense region comprise 2′-deoxy-purine nucleotides. In an alternative embodiment, the purine nucleotides present in the antisense region comprise 2′-O-methyl purine nucleotides. In either of the above embodiments, the antisense region can comprise a phosphorothioate internucleotide linkage at the 3′ end of the antisense region. Alternatively, in either of the above embodiments, the antisense region can comprise a glyceryl modification at the 3′ end of the antisense region. In another embodiment of any of the above-described siNA molecules, any nucleotides present in a non-complementary region of the antisense strand (e.g. overhang region) are 2′-deoxy nucleotides.

[0054] In one embodiment, the antisense region of an siNA molecule of the invention comprises sequence complementary to a portion of a SARS transcript having sequence unique to a particular SARS disease related allele, such as sequence comprising a SNP associated with the disease specific allele. As such, the antisense region of an siNA molecule of the invention can comprise sequence complementary to sequences that are unique to a particular allele to provide specificity in mediating selective RNAi against the disease related allele.

[0055] In one embodiment, the invention features a double-stranded short interfering nucleic acid (siNA) molecule that down-regulates expression of a SARS gene, wherein the siNA molecule is assembled from two separate oligonucleotide fragments wherein one fragment comprises the sense region and the second fragment comprises the antisense region of the siNA molecule. In another embodiment about 19 nucleotides of each fragment of the siNA molecule are base-paired to the complementary nucleotides of the other fragment of the siNA molecule and wherein at least two 3′ terminal nucleotides of each fragment of the siNA molecule are not base-paired to the nucleotides of the other fragment of the siNA molecule. In one embodiment, each of the two 3′ terminal nucleotides of each fragment of the siNA molecule is a 2′-deoxy-pyrimidine nucleotide, such as a 2′-deoxy-thymidine. In another embodiment, all 21 nucleotides of each fragment of the siNA molecule are base-paired to the complementary nucleotides of the other fragment of the siNA molecule. In another embodiment, about 19 nucleotides of the antisense region are base-paired to the nucleotide sequence or a portion thereof of the RNA encoded by the SARS gene. In another embodiment, about 21 nucleotides of the antisense region are base-paired to the nucleotide sequence or a portion thereof of the RNA encoded by the SARS gene. In any of the above embodiments, the 5′-end of the fragment comprising said antisense region can optionally includes a phosphate group.

[0056] In one embodiment, the invention features a double-stranded short interfering nucleic acid (siNA) molecule that inhibits the expression of a SARS RNA sequence (e.g., wherein said target RNA sequence is encoded by a SARS gene involved in the SARS pathway), wherein the siNA molecule does not contain any ribonucleotides and wherein each strand of the double-stranded siNA molecule is about 21 nucleotides long. Examples of non-ribonucleotide containing siNA constructs are combinations of stabilization chemistries shown in Table IV in any combination of Sense/Antisense chemistries, such as Stab 7/8, Stab 7/11, Stab 8/8, Stab 18/8, Stab 18/11, Stab 12/13, Stab 7/13, Stab 18/13, Stab 7/19, Stab 8/19, Stab 18/19, Stab 7/20, Stab 8/20, or Stab 18/20.

[0057] In one embodiment, the invention features a chemically synthesized double-stranded RNA molecule that directs cleavage of a SARS RNA via RNA interference, wherein each strand of said RNA molecule is about 21 to about 23 nucleotides in length; one strand of the RNA molecule comprises nucleotide sequence having sufficient complementarity to the SARS RNA for the RNA molecule to direct cleavage of the SARS RNA via RNA interference; and wherein at least one strand of the RNA molecule comprises one or more chemically modified nucleotides described herein, such as deoxynucleotides, 2′-O-methyl nucleotides, 2′-deoxy-2′-fluoro nucleotides, 2′-O-methoxyethyl nucleotides etc.

[0058] In one embodiment, the invention features a medicament comprising an siNA molecule of the invention.

[0059] In one embodiment, the invention features an active ingredient comprising an siNA molecule of the invention.

[0060] In one embodiment, the invention features the use of a double-stranded short interfering nucleic acid (siNA) molecule to down-regulate expression of a SARS gene, wherein the siNA molecule comprises one or more chemical modifications and each strand of the double-stranded siNA is about 18 to about 28 or more (e.g., 18, 19, 20, 21, 22, 23, 24, 25, 26, 27, 28 or more) nucleotides long.

[0061] In one embodiment, the invention features the use of a double-stranded short interfering nucleic acid (siNA) molecule that inhibits expression of a SARS gene, wherein one of the strands of the double-stranded siNA molecule is an antisense strand which comprises nucleotide sequence that is complementary to nucleotide sequence of SARS RNA or a portion thereof, the other strand is a sense strand which comprises nucleotide sequence that is complementary to a nucleotide sequence of the antisense strand and wherein a majority of the pyrimidine nucleotides present in the double-stranded siNA molecule comprises a sugar modification.

[0062] In one embodiment, the invention features a double-stranded short interfering nucleic acid (siNA) molecule that inhibits expression of a SARS gene, wherein one of the strands of the double-stranded siNA molecule is an antisense strand which comprises nucleotide sequence that is complementary to nucleotide sequence of SARS RNA or a portion thereof, wherein the other strand is a sense strand which comprises nucleotide sequence that is complementary to a nucleotide sequence of the antisense strand and wherein a majority of the pyrimidine nucleotides present in the double-stranded siNA molecule comprises a sugar modification.

[0063] In one embodiment, the invention features a double-stranded short interfering nucleic acid (siNA) molecule that inhibits expression of a SARS gene, wherein one of the strands of the double-stranded siNA molecule is an antisense strand which comprises nucleotide sequence that is complementary to nucleotide sequence of SARS RNA that encodes a protein or portion thereof, the other strand is a sense strand which comprises nucleotide sequence that is complementary to a nucleotide sequence of the antisense strand and wherein a majority of the pyrimidine nucleotides present in the double-stranded siNA molecule comprises a sugar modification. In one embodiment, the invention features a double-stranded short interfering nucleic acid (siNA) molecule that inhibits expression of a SARS gene, wherein one of the strands of the double-stranded siNA molecule is an antisense strand which comprises nucleotide sequence that is complementary to nucleotide sequence of SARS RNA or a portion thereof, the other strand is a sense strand which comprises nucleotide sequence that is complementary to a nucleotide sequence of the antisense strand and wherein a majority of the pyrimidine nucleotides present in the double-stranded siNA molecule comprises a sugar modification. In one embodiment, each strand of the siNA molecule comprises about 18 to about 29 or more (e.g., about 18, 19, 20, 21, 22, 23, 24, 25, 26, 27, 28, 29 or more) nucleotides, wherein each strand comprises at least about 18 nucleotides that are complementary to the nucleotides of the other strand. In another embodiment, the siNA molecule is assembled from two oligonucleotide fragments, wherein one fragment comprises the nucleotide sequence of the antisense strand of the siNA molecule and a second fragment comprises nucleotide sequence of the sense region of the siNA molecule. In yet another embodiment, the sense strand is connected to the antisense strand via a linker molecule, such as a polynucleotide linker or a non-nucleotide linker. In a further embodiment, the pyrimidine nucleotides present in the sense strand are 2′-deoxy-2′fluoro pyrimidine nucleotides and the purine nucleotides present in the sense region are 2′-deoxy purine nucleotides. In another embodiment, the pyrimidine nucleotides present in the sense strand are 2′-deoxy-2′fluoro pyrimidine nucleotides and the purine nucleotides present in the sense region are 2′-O-methyl purine nucleotides. In still another embodiment, the pyrimidine nucleotides present in the antisense strand are 2′-deoxy-2′-fluoro pyrimidine nucleotides and any purine nucleotides present in the antisense strand are 2′-deoxy purine nucleotides. In another embodiment, the antisense strand comprises one or more 2′-deoxy-2′-fluoro pyrimidine nucleotides and one or more 2′-O-methyl purine nucleotides. In another embodiment, the pyrimidine nucleotides present in the antisense strand are 2′-deoxy-2′-fluoro pyrimidine nucleotides and any purine nucleotides present in the antisense strand are 2′-O-methyl purine nucleotides. In a further embodiment the sense strand comprises a 3′-end and a 5′-end, wherein a terminal cap moiety (e.g., an inverted deoxy abasic moiety or inverted deoxy nucleotide moiety such as inverted thymidine) is present at the 5′-end, the 3′-end, or both of the 5′ and 3′ ends of the sense strand. In another embodiment, the antisense strand comprises a phosphorothioate internucleotide linkage at the 3′ end of the antisense strand. In another embodiment, the antisense strand comprises a glyceryl modification at the 3′ end. In another embodiment, the 5′-end of the antisense strand optionally includes a phosphate group.

[0064] In one embodiment, the invention features a double-stranded short interfering nucleic acid (siNA) molecule that inhibits expression of a SARS gene, wherein one of the strands of the double-stranded siNA molecule is an antisense strand which comprises nucleotide sequence that is complementary to nucleotide sequence of SARS RNA or a portion thereof, wherein the other strand is a sense strand which comprises nucleotide sequence that is complementary to a nucleotide sequence of the antisense strand and wherein a majority of the pyrimidine nucleotides present in the double-stranded siNA molecule comprises a sugar modification, and wherein each of the two strands of the siNA molecule comprises about 21 nucleotides. In one embodiment, about 21 nucleotides of each strand of the siNA molecule are base-paired to the complementary nucleotides of the other strand of the siNA molecule. In another embodiment, about 19 nucleotides of each strand of the siNA molecule are base-paired to the complementary nucleotides of the other strand of the siNA molecule, wherein at least two 3′ terminal nucleotides of each strand of the siNA molecule are not base-paired to the nucleotides of the other strand of the siNA molecule. In another embodiment, each of the two 3′ terminal nucleotides of each fragment of the siNA molecule is a 2′-deoxy-pyrimidine, such as 2′-deoxy-thymidine. In another embodiment, each strand of the siNA molecule is base-paired to the complementary nucleotides of the other strand of the siNA molecule. In another embodiment, about 19 nucleotides of the antisense strand are base-paired to the nucleotide sequence of the SARS RNA or a portion thereof. In another embodiment, about 21 nucleotides of the antisense strand are base-paired to the nucleotide sequence of the SARS RNA or a portion thereof.

[0065] In one embodiment, the invention features a double-stranded short interfering nucleic acid (siNA) molecule that inhibits expression of a SARS gene, wherein one of the strands of the double-stranded siNA molecule is an antisense strand which comprises nucleotide sequence that is complementary to nucleotide sequence of SARS RNA or a portion thereof, the other strand is a sense strand which comprises nucleotide sequence that is complementary to a nucleotide sequence of the antisense strand and wherein a majority of the pyrimidine nucleotides present in the double-stranded siNA molecule comprises a sugar modification, and wherein the 5′-end of the antisense strand optionally includes a phosphate group.

[0066] In one embodiment, the invention features a double-stranded short interfering nucleic acid (siNA) molecule that inhibits expression of a SARS gene, wherein one of the strands of the double-stranded siNA molecule is an antisense strand which comprises nucleotide sequence that is complementary to nucleotide sequence of SARS RNA or a portion thereof, the other strand is a sense strand which comprises nucleotide sequence that is complementary to a nucleotide sequence of the antisense strand and wherein a majority of the pyrimidine nucleotides present in the double-stranded siNA molecule comprises a sugar modification, and wherein the nucleotide sequence or a portion thereof of the antisense strand is complementary to a nucleotide sequence of the untranslated region or a portion thereof of the SARS RNA.

[0067] In one embodiment, the invention features a double-stranded short interfering nucleic acid (siNA) molecule that inhibits expression of a SARS gene, wherein one of the strands of the double-stranded siNA molecule is an antisense strand which comprises nucleotide sequence that is complementary to nucleotide sequence of SARS RNA or a portion thereof, wherein the other strand is a sense strand which comprises nucleotide sequence that is complementary to a nucleotide sequence of the antisense strand, wherein a majority of the pyrimidine nucleotides present in the double-stranded siNA molecule comprises a sugar modification, and wherein the nucleotide sequence of the antisense strand is complementary to a nucleotide sequence of the SARS RNA or a portion thereof that is present in the SARS RNA.

[0068] In one embodiment, the invention features a composition comprising an siNA molecule of the invention in a pharmaceutically acceptable carrier or diluent.

[0069] In a non-limiting example, the introduction of chemically modified nucleotides into nucleic acid molecules provides a powerful tool in overcoming potential limitations of in vivo stability and bioavailability inherent to native RNA molecules that are delivered exogenously. For example, the use of chemically modified nucleic acid molecules can enable a lower dose of a particular nucleic acid molecule for a given therapeutic effect since chemically modified nucleic acid molecules tend to have a longer half-life in serum. Furthermore, certain chemical modifications can improve the bioavailability of nucleic acid molecules by targeting particular cells or tissues and/or improving cellular uptake of the nucleic acid molecule. Therefore, even if the activity of a chemically modified nucleic acid molecule is reduced as compared to a native nucleic acid molecule, for example, when compared to an all-RNA nucleic acid molecule, the overall activity of the modified nucleic acid molecule can be greater than that of the native molecule due to improved stability and/or delivery of the molecule. Unlike native unmodified siNA, chemically modified siNA can also minimize the possibility of activating interferon activity in humans.

[0070] In any of the embodiments of siNA molecules described herein, the antisense region of an siNA molecule of the invention can comprise a phosphorothioate internucleotide linkage at the 3′-end of said antisense region. In any of the embodiments of siNA molecules described herein, the antisense region can comprise about one to about five phosphorothioate internucleotide linkages at the 5′-end of said antisense region. In any of the embodiments of siNA molecules described herein, the 3′-terminal nucleotide overhangs of an siNA molecule of the invention can comprise ribonucleotides or deoxyribonucleotides that are chemically modified at a nucleic acid sugar, base, or backbone. In any of the embodiments of siNA molecules described herein, the 3′-terminal nucleotide overhangs can comprise one or more universal base ribonucleotides. In any of the embodiments of siNA molecules described herein, the 3′-terminal nucleotide overhangs can comprise one or more acyclic nucleotides.

[0071] One embodiment of the invention provides an expression vector comprising a nucleic acid sequence encoding at least one siNA molecule of the invention in a manner that allows expression of the nucleic acid molecule. Another embodiment of the invention provides a mammalian cell comprising such an expression vector. The mammalian cell can be a human cell. The siNA molecule of the expression vector can comprise a sense region and an antisense region. The antisense region can comprise sequence complementary to a RNA or DNA sequence encoding SARS and the sense region can comprise sequence complementary to the antisense region. The siNA molecule can comprise two distinct strands having complementary sense and antisense regions. The siNA molecule can comprise a single strand having complementary sense and antisense regions.

[0072] In one embodiment, the nucleotide sequence of the antisense strand or a portion thereof of an siNA molecule of the invention is complementary to the nucleotide sequence of a SARS RNA or a portion thereof that is present in the RNA of all SARS isolates.

[0073] In one embodiment, the invention features a chemically modified short interfering nucleic acid (siNA) molecule capable of mediating RNA interference (RNAi) against SARS inside a cell or reconstituted in vitro system, wherein the chemical modification comprises one or more (e.g., about 1, 2, 3, 4, 5, 6, 7, 8, 9, 10, or more) nucleotides comprising a backbone modified internucleotide linkage having Formula I:

[chemical structure]

wherein each R1 and R2 is independently any nucleotide, non-nucleotide, or polynucleotide which can be naturally-occurring or chemically modified, each X and Y is independently O, S, N, alkyl, or substituted alkyl, each Z and W is independently O, S, N, alkyl, substituted alkyl, O-alkyl, S-alkyl, alkaryl, aralkyl, or acetyl and wherein W, X, Y, and Z are optionally not all O. In another embodiment, a backbone modification of the invention comprises a phosphonoacetate and/or thiophosphonoacetate internucleotide linkage (see for example Sheehan et al., 2003, Nucleic Acids Research, 31, 4109-4118).

[0074] The chemically modified internucleotide linkages having Formula I, for example, wherein any Z, W, X, and/or Y independently comprises a sulphur atom, can be present in one or both oligonucleotide strands of the siNA duplex, for example, in the sense strand, the antisense strand, or both strands. The siNA molecules of the invention can comprise one or more (e.g., about 1, 2, 3, 4, 5, 6, 7, 8, 9, 10, or more) chemically modified internucleotide linkages having Formula I at the 3′-end, the 5′-end, or both of the 3′ and 5′-ends of the sense strand, the antisense strand, or both strands. For example, an exemplary siNA molecule of the invention can comprise about 1 to about 5 or more (e.g., about 1, 2, 3, 4, 5, or more) chemically modified internucleotide linkages having Formula I at the 5′-end of the sense strand, the antisense strand, or both strands. In another non-limiting example, an exemplary siNA molecule of the invention can comprise one or more (e.g., about 1, 2, 3, 4, 5, 6, 7, 8, 9, 10, or more) pyrimidine nucleotides with chemically modified internucleotide linkages having Formula I in the sense strand, the antisense strand, or both strands. In yet another non-limiting example, an exemplary siNA molecule of the invention can comprise one or more (e.g., about 1, 2, 3, 4, 5, 6, 7, 8, 9, 10, or more) purine nucleotides with chemically modified internucleotide linkages having Formula I in the sense strand, the antisense strand, or both strands. In another embodiment, an siNA molecule of the invention having internucleotide linkage(s) of Formula I also comprises a chemically modified nucleotide or non-nucleotide having any of Formulae I-VII.

[0075] In one embodiment, the invention features a chemically modified short interfering nucleic acid (siNA) molecule capable of mediating RNA interference (RNAi) against SARS inside a cell or reconstituted in vitro system, wherein the chemical modification comprises one or more (e.g., about 1, 2, 3, 4, 5, 6, 7, 8, 9, 10, or more) nucleotides or non-nucleotides having Formula II:

[chemical structure]

wherein each R3, R4, R5, R6, R7, R8, R10, R11 and R12 is independently H, OH, alkyl, substituted alkyl, alkaryl or aralkyl, F, Cl, Br, CN, CF3, OCF3, OCN, O-alkyl, S-alkyl, N-alkyl, O-alkenyl, S-alkenyl, N-alkenyl, SO-alkyl, alkyl-SH, alkyl-OH, O-alkyl-OH, O-alkyl-SH, S-alkyl-OH, S-alkyl-SH, alkyl-5-alkyl, alkyl-O-alkyl, ONO2, NO2, N3, NH2, aminoalkyl, aminoacid, aminoacyl, ONH2, O-aminoalkyl, O-aminoacid, O-aminoacyl, heterocycloalkyl, heterocycloalkaryl, aminoalkylamino, polyalkylamino, substituted silyl, or group having Formula I or II; R9 is O, S, CH2, S═O, CHF, or CF2, and B is a nucleosidic base such as adenine, guanine, uracil, cytosine, thymine, 2-aminoadenosine, 5-methylcytosine, 2,6-diaminopurine, or any other non-naturally occurring base that can be complementary or non-complementary to target RNA or a non-nucleosidic base such as phenyl, naphthyl, 3-nitropyrrole, 5-nitroindole, nebularine, pyridone, pyridinone, or any other non-naturally occurring universal base that can be complementary or non-complementary to target RNA.

[0076] The chemically modified nucleotide or non-nucleotide of Formula II can be present in one or both oligonucleotide strands of the siNA duplex, for example in the sense strand, the antisense strand, or both strands. The siNA molecules of the invention can comprise one or more chemically modified nucleotide or non-nucleotide of Formula II at the 3′-end, the 5′-end, or both of the 3′ and 5′-ends of the sense strand, the antisense strand, or both strands. For example, an exemplary siNA molecule of the invention can comprise about 1 to about 5 or more (e.g., about 1, 2, 3, 4, 5, or more) chemically modified nucleotides or non-nucleotides of Formula II at the 5′-end of the sense strand, the antisense strand, or both strands. In another non-limiting example, an exemplary siNA molecule of the invention can comprise about 1 to about 5 or more (e.g., about 1, 2, 3, 4, 5, or more) chemically modified nucleotides or non-nucleotides of Formula II at the 3′-end of the sense strand, the antisense strand, or both strands.

[0077] In one embodiment, the invention features a chemically modified short interfering nucleic acid (siNA) molecule capable of mediating RNA interference (RNAi) against SARS inside a cell or reconstituted in vitro system, wherein the chemical modification comprises one or more (e.g., about 1, 2, 3, 4, 5, 6, 7, 8, 9, 10, or more) nucleotides or non-nucleotides having Formula III:

[chemical structure]

wherein each R3, R4, R5, R6, R7, R8, R10, R11 and R12 is independently H, OH, alkyl, substituted alkyl, alkaryl or aralkyl, F, Cl, Br, CN, CF3, OCF3, OCN, O-alkyl, S-alkyl, N-alkyl, O-alkenyl, S-alkenyl, N-alkenyl, SO-alkyl, alkyl-SH, alkyl-OH, O-alkyl-OH, O-alkyl-SH, S-alkyl-OH, S-alkyl-SH, alkyl-5-alkyl, alkyl-O-alkyl, ONO2, NO2, N3, NH2, aminoalkyl, aminoacid, aminoacyl, ONH2, O-aminoalkyl, O-aminoacid, O-aminoacyl, heterocycloalkyl, heterocycloalkaryl, aminoalkylamino, polyalkylamino, substituted silyl, or group having Formula I or II; R9 is O, S, CH2, S═O, CHF, or CF2, and B is a nucleosidic base such as adenine, guanine, uracil, cytosine, thymine, 2-aminoadenosine, 5-methylcytosine, 2,6-diaminopurine, or any other non-naturally occurring base that can be employed to be complementary or non-complementary to target RNA or a non-nucleosidic base such as phenyl, naphthyl, 3-nitropyrrole, 5-nitroindole, nebularine, pyridone, pyridinone, or any other non-naturally occurring universal base that can be complementary or non-complementary to target RNA.

[0078] The chemically modified nucleotide or non-nucleotide of Formula III can be present in one or both oligonucleotide strands of the siNA duplex, for example, in the sense strand, the antisense strand, or both strands. The siNA molecules of the invention can comprise one or more chemically modified nucleotide or non-nucleotide of Formula III at the 3′-end, the 5′-end, or both of the 3′ and 5′-ends of the sense strand, the antisense strand, or both strands. For example, an exemplary siNA molecule of the invention can comprise about 1 to about 5 or more (e.g., about 1, 2, 3, 4, 5, or more) chemically modified nucleotide(s) or non-nucleotide(s) of Formula III at the 5′-end of the sense strand, the antisense strand, or both strands. In another non-limiting example, an exemplary siNA molecule of the invention can comprise about 1 to about 5 or more (e.g., about 1, 2, 3, 4, 5, or more) chemically modified nucleotide or non-nucleotide of Formula III at the 3′-end of the sense strand, the antisense strand, or both strands.

[0079] In another embodiment, an siNA molecule of the invention comprises a nucleotide having Formula II or III, wherein the nucleotide having Formula II or III is in an inverted configuration. For example, the nucleotide having Formula II or III is connected to the siNA construct in a 3′-3′,3′-2′, 2′-3′, or 5′-5′ configuration, such as at the 3′-end, the 5′-end, or both of the 3′ and 5′-ends of one or both siNA strands.

[0080] In one embodiment, the invention features a chemically modified short interfering nucleic acid (siNA) molecule capable of mediating RNA interference (RNAi) against SARS inside a cell or reconstituted in vitro system, wherein the chemical modification comprises a 5′-terminal phosphate group having Formula IV:

[chemical structure]

wherein each X and Y is independently O, S, N, alkyl, substituted alkyl, or alkylhalo; wherein each Z and W is independently O, S, N, alkyl, substituted alkyl, O-alkyl, S-alkyl, alkaryl, aralkyl, alkylhalo, or acetyl; and wherein W, X, Y and Z are not all O.

[0081] In one embodiment, the invention features an siNA molecule having a 5′-terminal phosphate group having Formula IV on the target-complementary strand, for example, a strand complementary to a target RNA, wherein the siNA molecule comprises an all RNA siNA molecule. In another embodiment, the invention features an siNA molecule having a 5′-terminal phosphate group having Formula IV on the target-complementary strand wherein the siNA molecule also comprises about 1 to about 3 (e.g., about 1, 2, or 3) nucleotide 3′-terminal nucleotide overhangs having about 1 to about 4 (e.g., about 1, 2, 3, or 4) deoxyribonucleotides on the 3′-end of one or both strands. In another embodiment, a 5′-terminal phosphate group having Formula IV is present on the target-complementary strand of an siNA molecule of the invention, for example an siNA molecule having chemical modifications having any of Formulae I-VII.

[0082] In one embodiment, the invention features a chemically modified short interfering nucleic acid (siNA) molecule capable of mediating RNA interference (RNAi) against SARS inside a cell or reconstituted in vitro system, wherein the chemical modification comprises one or more phosphorothioate internucleotide linkages. For example, in a non-limiting example, the invention features a chemically modified short interfering nucleic acid (siNA) having about 1, 2, 3, 4, 5, 6, 7, 8 or more phosphorothioate internucleotide linkages in one siNA strand. In yet another embodiment, the invention features a chemically modified short interfering nucleic acid (siNA) individually having about 1, 2, 3, 4, 5, 6, 7, 8 or more phosphorothioate internucleotide linkages in both siNA strands. The phosphorothioate internucleotide linkages can be present in one or both oligonucleotide strands of the siNA duplex, for example in the sense strand, the antisense strand, or both strands. The siNA molecules of the invention can comprise one or more phosphorothioate internucleotide linkages at the 3′-end, the 5′-end, or both of the 3′- and 5′-ends of the sense strand, the antisense strand, or both strands. For example, an exemplary siNA molecule of the invention can comprise about 1 to about 5 or more (e.g., about 1, 2, 3, 4, 5, or more) consecutive phosphorothioate internucleotide linkages at the 5′-end of the sense strand, the antisense strand, or both strands. In another non-limiting example, an exemplary siNA molecule of the invention can comprise one or more (e.g., about 1, 2, 3, 4, 5, 6, 7, 8, 9, 10, or more) pyrimidine phosphorothioate internucleotide linkages in the sense strand, the antisense strand, or both strands. In yet another non-limiting example, an exemplary siNA molecule of the invention can comprise one or more (e.g., about 1, 2, 3, 4, 5, 6, 7, 8, 9, 10, or more) purine phosphorothioate internucleotide linkages in the sense strand, the antisense strand, or both strands.

[0083] In one embodiment, the invention features an siNA molecule, wherein the sense strand comprises one or more, for example, about 1, 2, 3, 4, 5, 6, 7, 8, 9, 10, or more phosphorothioate internucleotide linkages, and/or one or more (e.g., about 1, 2, 3, 4, 5, 6, 7, 8, 9, 10 or more) 2′-deoxy, 2′-O-methyl, 2′-deoxy-2′-fluoro, and/or about one or more (e.g., about 1, 2, 3, 4, 5, 6, 7, 8, 9, 10 or more) universal base modified nucleotides, and optionally a terminal cap molecule at the 3′-end, the 5′-end, or both of the 3′- and 5′-ends of the sense strand; and wherein the antisense strand comprises about 1 to about 10 or more, specifically about 1, 2, 3, 4, 5, 6, 7, 8, 9, 10, or more phosphorothioate internucleotide linkages, and/or one or more (e.g., about 1, 2, 3, 4, 5, 6, 7, 8, 9, 10 or more) 2′-deoxy, 2′-O-methyl, 2′-deoxy-2′-fluoro, and/or one or more (e.g., about 1, 2, 3, 4, 5, 6, 7, 8, 9, 10 or more) universal base modified nucleotides, and optionally a terminal cap molecule at the 3′-end, the 5′-end, or both of the 3′- and 5′-ends of the antisense strand. In another embodiment, one or more, for example about 1, 2, 3, 4, 5, 6, 7, 8, 9, 10, or more, pyrimidine nucleotides of the sense and/or antisense siNA strand are chemically modified with 2′-deoxy, 2′-O-methyl and/or 2′-deoxy-2′-fluoro nucleotides, with or without one or more, for example about 1, 2, 3, 4, 5, 6, 7, 8, 9, 10, or more, phosphorothioate internucleotide linkages and/or a terminal cap molecule at the 3′-end, the 5′-end, or both of the 3′- and 5′-ends, being present in the same or different strand.

[0084] In another embodiment, the invention features an siNA molecule, wherein the sense strand comprises about 1 to about 5, specifically about 1, 2, 3, 4, or 5 phosphorothioate internucleotide linkages, and/or one or more (e.g., about 1, 2, 3, 4, 5, or more) 2′-deoxy, 2′-O-methyl, 2′-deoxy-2′-fluoro, and/or one or more (e.g., about 1, 2, 3, 4, 5, or more) universal base modified nucleotides, and optionally a terminal cap molecule at the 3-end, the 5′-end, or both of the 3′- and 5′-ends of the sense strand; and wherein the antisense strand comprises about 1 to about 5 or more, specifically about 1, 2, 3, 4, 5, or more phosphorothioate internucleotide linkages, and/or one or more (e.g., about 1, 2, 3, 4, 5, 6, 7, 8, 9, 10 or more) 2′-deoxy, 2′-O-methyl, 2′-deoxy-2′-fluoro, and/or one or more (e.g., about 1, 2, 3, 4, 5, 6, 7, 8, 9, 10 or more) universal base modified nucleotides, and optionally a terminal cap molecule at the 3′-end, the 5′-end, or both of the 3′- and 5′-ends of the antisense strand. In another embodiment, one or more, for example about 1, 2, 3, 4, 5, 6, 7, 8, 9, 10, or more, pyrimidine nucleotides of the sense and/or antisense siNA strand are chemically modified with 2′-deoxy, 2′-O-methyl and/or 2′-deoxy-2′-fluoro nucleotides, with or without about 1 to about 5 or more, for example about 1, 2, 3, 4, 5, or more phosphorothioate internucleotide linkages and/or a terminal cap molecule at the 3′-end, the 5′-end, or both of the 3′- and 5′-ends, being present in the same or different strand.

[0085] In one embodiment, the invention features an siNA molecule, wherein the antisense strand comprises one or more, for example, about 1, 2, 3, 4, 5, 6, 7, 8, 9, 10, or more phosphorothioate internucleotide linkages, and/or about one or more (e.g., about 1, 2, 3, 4, 5, 6, 7, 8, 9, 10 or more) 2′-deoxy, 2′-O-methyl, 2′-deoxy-2′-fluoro, and/or one or more (e.g., about 1, 2, 3, 4, 5, 6, 7, 8, 9, 10 or more) universal base modified nucleotides, and optionally a terminal cap molecule at the 3′-end, the 5′-end, or both of the 3′- and 5′-ends of the sense strand; and wherein the antisense strand comprises about 1 to about 10 or more, specifically about 1, 2, 3, 4, 5, 6, 7, 8, 9, 10 or more phosphorothioate internucleotide linkages, and/or one or more (e.g., about 1, 2, 3, 4, 5, 6, 7, 8, 9, 10 or more) 2′-deoxy, 2′-O-methyl, 2′-deoxy-2′-fluoro, and/or one or more (e.g., about 1, 2, 3, 4, 5, 6, 7, 8, 9, 10 or more) universal base modified nucleotides, and optionally a terminal cap molecule at the 3′-end, the 5′-end, or both of the 3′- and 5′-ends of the antisense strand. In another embodiment, one or more, for example about 1, 2, 3, 4, 5, 6, 7, 8, 9, 10 or more pyrimidine nucleotides of the sense and/or antisense siNA strand are chemically modified with 2′-deoxy, 2′-O-methyl and/or 2′-deoxy-2′-fluoro nucleotides, with or without one or more, for example, about 1, 2, 3, 4, 5, 6, 7, 8, 9, 10 or more phosphorothioate internucleotide linkages and/or a terminal cap molecule at the 3′-end, the 5′-end, or both of the 3′ and 5′-ends, being present in the same or different strand.

[0086] In another embodiment, the invention features an siNA molecule, wherein the antisense strand comprises about 1 to about 5 or more, specifically about 1, 2, 3, 4, 5 or more phosphorothioate internucleotide linkages, and/or one or more (e.g., about 1, 2, 3, 4, 5, 6, 7, 8, 9, 10 or more) 2′-deoxy, 2′-O-methyl, 2′-deoxy-2′-fluoro, and/or one or more (e.g., about 1, 2, 3, 4, 5, 6, 7, 8, 9, 10 or more) universal base modified nucleotides, and optionally a terminal cap molecule at the 3′-end, the 5′-end, or both of the 3′- and 5′-ends of the sense strand; and wherein the antisense strand comprises about 1 to about 5 or more, specifically about 1, 2, 3, 4, 5 or more phosphorothioate internucleotide linkages, and/or one or more (e.g., about 1, 2, 3, 4, 5, 6, 7, 8, 9, 10 or more) 2′-deoxy, 2′-O-methyl, 2′-deoxy-2′-fluoro, and/or one or more (e.g., about 1, 2, 3, 4, 5, 6, 7, 8, 9, 10 or more) universal base modified nucleotides, and optionally a terminal cap molecule at the 3′-end, the 5′-end, or both of the 3′- and 5′-ends of the antisense strand. In another embodiment, one or more, for example about 1, 2, 3, 4, 5, 6, 7, 8, 9, 10 or more pyrimidine nucleotides of the sense and/or antisense siNA strand are chemically modified with 2′-deoxy, 2′-O-methyl and/or 2′-deoxy-2′-fluoro nucleotides, with or without about 1 to about 5, for example about 1, 2, 3, 4, 5 or more phosphorothioate internucleotide linkages and/or a terminal cap molecule at the 3′-end, the 5′-end, or both of the 3′- and 5′-ends, being present in the same or different strand.

[0087] In one embodiment, the invention features a chemically modified short interfering nucleic acid (siNA) molecule having about 1 to about 5, specifically about 1, 2, 3, 4, 5 or more phosphorothioate internucleotide linkages in each strand of the siNA molecule.

[0088] In another embodiment, the invention features an siNA molecule comprising 2′-5′ internucleotide linkages. The 2′-5′ internucleotide linkage(s) can be at the 3′-end, the 5′-end, or both of the 3′- and 5′-ends of one or both siNA sequence strands. In addition, the 2′-5′ internucleotide linkage(s) can be present at various other positions within one or both siNA sequence strands, for example, about 1, 2, 3, 4, 5, 6, 7, 8, 9, 10, or more including every internucleotide linkage of a pyrimidine nucleotide in one or both strands of the siNA molecule can comprise a 2′-5′ internucleotide linkage, or about 1, 2, 3, 4, 5, 6, 7, 8, 9, 10, or more including every internucleotide linkage of a purine nucleotide in one or both strands of the siNA molecule can comprise a 2′-5′ internucleotide linkage.

[0089] In another embodiment, a chemically modified siNA molecule of the invention comprises a duplex having two strands, one or both of which can be chemically modified, wherein each strand is about 18 to about 27 (e.g., about 18, 19, 20, 21, 22, 23, 24, 25, 26, or 27) nucleotides in length, wherein the duplex has about 18 to about 23 (e.g., about 18, 19, 20, 21, 22, or 23) base pairs, and wherein the chemical modification comprises a structure having any of Formulae I-VII. For example, an exemplary chemically modified siNA molecule of the invention comprises a duplex having two strands, one or both of which can be chemically modified with a chemical modification having any of Formulae I-VII or any combination thereof, wherein each strand consists of about 21 nucleotides, each having a 2-nucleotide 3′-terminal nucleotide overhang, and wherein the duplex has about 19 base pairs. In another embodiment, an siNA molecule of the invention comprises a single-stranded hairpin structure, wherein the siNA is about 36 to about 70 (e.g., about 36, 40, 45, 50, 55, 60, 65, or 70) nucleotides in length having about 18 to about 23 (e.g., about 18, 19, 20, 21, 22, or 23) base pairs, and wherein the siNA can include a chemical modification comprising a structure having any of Formulae I-VII or any combination thereof. For example, an exemplary chemically modified siNA molecule of the invention comprises a linear oligonucleotide having about 42 to about 50 (e.g., about 42, 43, 44, 45, 46, 47, 48, 49, or 50) nucleotides that is chemically modified with a chemical modification having any of Formulae I-VII or any combination thereof, wherein the linear oligonucleotide forms a hairpin structure having about 19 base pairs and a 2-nucleotide 3′-terminal nucleotide overhang. In another embodiment, a linear hairpin siNA molecule of the invention contains a stem loop motif, wherein the loop portion of the siNA molecule is biodegradable. For example, a linear hairpin siNA molecule of the invention is designed such that degradation of the loop portion of the siNA molecule in vivo can generate a double-stranded siNA molecule with 3′-terminal overhangs, such as 3′-terminal nucleotide overhangs comprising about 2 nucleotides.

[0090] In another embodiment, an siNA molecule of the invention comprises a hairpin structure, wherein the siNA is about 25 to about 50 (e.g., about 25, 26, 27, 28, 29, 30, 31, 32, 33, 34, 35, 36, 37, 38, 39, 40, 41, 42, 43, 44, 45, 46, 47, 48, 49, or 50) nucleotides in length having about 3 to about 25 (e.g., about 3, 4, 5, 6, 7, 8, 9, 10, 11, 12, 13, 14, 15, 16, 17, 18, 19, 20, 21, 22, 23, 24, or 25) base pairs, and wherein the siNA can include one or more chemical modifications comprising a structure having any of Formulae I-VII or any combination thereof. For example, an exemplary chemically modified siNA molecule of the invention comprises a linear oligonucleotide having about 25 to about 35 (e.g., about 25, 26, 27, 28, 29, 30, 31, 32, 33, 34, or 35) nucleotides that is chemically modified with one or more chemical modifications having any of Formulae I-VII or any combination thereof, wherein the linear oligonucleotide forms a hairpin structure having about 3 to about 23 (e.g., about 3, 4, 5, 6, 7, 8, 9, 10, 11, 12, 13, 14, 15, 16, 17, 18, 19, 20, 21, 22, or 23) base pairs and a 5′-terminal phosphate group that can be chemically modified as described herein (for example a 5′-terminal phosphate group having Formula IV). In another embodiment, a linear hairpin siNA molecule of the invention contains a stem loop motif, wherein the loop portion of the siNA molecule is biodegradable. In another embodiment, a linear hairpin siNA molecule of the invention comprises a loop portion comprising a non-nucleotide linker.

[0091] In another embodiment, an siNA molecule of the invention comprises an asymmetric hairpin structure, wherein the siNA is about 25 to about 50 (e.g., about 25, 26, 27, 28, 29, 30, 31, 32, 33, 34, 35, 36, 37, 38, 39, 40, 41, 42, 43, 44, 45, 46, 47, 48, 49, or 50) nucleotides in length having about 3 to about 20 (e.g., about 3, 4, 5, 6, 7, 8, 9, 10, 11, 12, 13, 14, 15, 16, 17, 18, 19, or 20) base pairs, and wherein the siNA can include one or more chemical modifications comprising a structure having any of Formulae I-VII or any combination thereof. For example, an exemplary chemically modified siNA molecule of the invention comprises a linear oligonucleotide having about 25 to about 35 (e.g., about 25, 26, 27, 28, 29, 30, 31, 32, 33, 34, or 35) nucleotides that is chemically modified with one or more chemical modifications having any of Formulae I-VII or any combination thereof, wherein the linear oligonucleotide forms an asymmetric hairpin structure having about 3 to about 18 (e.g., about 3, 4, 5, 6, 7, 8, 9, 10, 11, 12, 13, 14, 15, 16, 17 or 18) base pairs and a 5′-terminal phosphate group that can be chemically modified as described herein (for example a 5′-terminal phosphate group having Formula IV). In another embodiment, an asymmetric hairpin siNA molecule of the invention contains a stem loop motif, wherein the loop portion of the siNA molecule is biodegradable. In another embodiment, an asymmetric hairpin siNA molecule of the invention comprises a loop portion comprising a non-nucleotide linker.

[0092] In another embodiment, an siNA molecule of the invention comprises an asymmetric double-stranded structure having separate polynucleotide strands comprising sense and antisense regions, wherein the antisense region is about 16 to about 25 (e.g., about 16, 17, 18, 19, 20, 21, 22, 23, 24, or 25) nucleotides in length, wherein the sense region is about 3 to about 18 (e.g., about 3, 4, 5, 6, 7, 8, 9, 10, 11, 12, 13, 14, 15, 16, 17, or 18) nucleotides in length, wherein the sense region and the antisense region have at least 3 complementary nucleotides, and wherein the siNA can include one or more chemical modifications comprising a structure having any of Formulae I-VII or any combination thereof. For example, an exemplary chemically modified siNA molecule of the invention comprises an asymmetric double-stranded structure having separate polynucleotide strands comprising sense and antisense regions, wherein the antisense region is about 18 to about 22 (e.g., about 18, 19, 20, 21, or 22) nucleotides in length and wherein the sense region is about 3 to about 15 (e.g., about 3, 4, 5, 6, 7, 8, 9, 10, 11, 12, 13, 14, or 15) nucleotides in length, wherein the sense region the antisense region have at least 3 complementary nucleotides, and wherein the siNA can include one or more chemical modifications comprising a structure having any of Formulae I-VII or any combination thereof. In another embodiment, the asymmetric double-stranded siNA molecule can also have a 5′-terminal phosphate group that can be chemically modified as described herein (for example a 5′-terminal phosphate group having Formula IV).

[0093] In another embodiment, an siNA molecule of the invention comprises a circular nucleic acid molecule, wherein the siNA is about 38 to about 70 (e.g., about 38, 40, 45, 50, 55, 60, 65, or 70) nucleotides in length having about 18 to about 23 (e.g., about 18, 19, 20, 21, 22, or 23) base pairs, and wherein the siNA can include a chemical modification, which comprises a structure having any of Formulae I-VII or any combination thereof. For example, an exemplary chemically modified siNA molecule of the invention comprises a circular oligonucleotide having about 42 to about 50 (e.g., about 42, 43, 44, 45, 46, 47, 48, 49, or 50) nucleotides that is chemically modified with a chemical modification having any of Formulae I-VII or any combination thereof, wherein the circular oligonucleotide forms a dumbbell shaped structure having about 19 base pairs and 2 loops.

[0094] In another embodiment, a circular siNA molecule of the invention contains two loop motifs, wherein one or both loop portions of the siNA molecule is biodegradable. For example, a circular siNA molecule of the invention is designed such that degradation of the loop portions of the siNA molecule in vivo can generate a double-stranded siNA molecule with 3′-terminal overhangs, such as 3′-terminal nucleotide overhangs comprising about 2 nucleotides.

[0095] In one embodiment, an siNA molecule of the invention comprises at least one (e.g., about 1, 2, 3, 4, 5, 6, 7, 8, 9, 10, or more) abasic moiety, for example a compound having Formula V:

[chemical structure]

wherein each R3, R4, R5, R6, R7, R8, R10, R11, R12, and R13 is independently H, OH, alkyl, substituted alkyl, alkaryl or aralkyl, F, Cl, Br, CN, CF3, OCF3, OCN, O-alkyl, S-alkyl, N-alkyl, O-alkenyl, S-alkenyl, N-alkenyl, SO-alkyl, alkyl-SH, alkyl-OH, O-alkyl-OH, O-alkyl-SH, S-alkyl-OH, S-alkyl-SH, alkyl-5-alkyl, alkyl-O-alkyl, ONO2, NO2, N3, NH2, aminoalkyl, aminoacid, aminoacyl, ONH2, O-aminoalkyl, O-aminoacid, O-aminoacyl, heterocycloalkyl, heterocycloalkaryl, aminoalkylamino, polyalkylamino, substituted silyl, or group having Formula I or II; R9 is O, S, CH2, S═O, CHF, or CF2.

[0096] In one embodiment, an siNA molecule of the invention comprises at least one (e.g., about 1, 2, 3, 4, 5, 6, 7, 8, 9, 10, or more) inverted abasic moiety, for example a compound having Formula VI:

[chemical structure]

wherein each R3, R4, R5, R6, R7, R8, R10, R11, R12, and R13 is independently H, OH, alkyl, substituted alkyl, alkaryl or aralkyl, F, Cl, Br, CN, CF3, OCF3, OCN, O-alkyl, S-alkyl, N-alkyl, O-alkenyl, S-alkenyl, N-alkenyl, SO-alkyl, alkyl-SH, alkyl-OH, O-alkyl-OH, O-alkyl-SH, S-alkyl-OH, S-alkyl-SH, alkyl-5-alkyl, alkyl-O-alkyl, ONO2, NO2, N3, NH2, aminoalkyl, aminoacid, aminoacyl, ONH2, O-aminoalkyl, O-aminoacid, O-aminoacyl, heterocycloalkyl, heterocycloalkaryl, aminoalkylamino, polyalkylamino, substituted silyl, or group having Formula I or II; R9 is O, S, CH2, S═O, CHF, or CF2, and either R5, R3, R8 or R13 serve as points of attachment to the siNA molecule of the invention.

[0097] In another embodiment, an siNA molecule of the invention comprises at least one (e.g., about 1, 2, 3, 4, 5, 6, 7, 8, 9, 10, or more) substituted polyalkyl moieties, for example a compound having Formula VII:

[chemical structure]

wherein each n is independently an integer from 1 to 12, each R1, R2 and R3 is independently H, OH, alkyl, substituted alkyl, alkaryl or aralkyl, F, Cl, Br, CN, CF3, OCF3, OCN, O-alkyl, S-alkyl, N-alkyl, O-alkenyl, S-alkenyl, N-alkenyl, SO-alkyl, alkyl-SH, alkyl-OH, O-alkyl-OH, O-alkyl-SH, S-alkyl-OH, S-alkyl-SH, alkyl-5-alkyl, alkyl-O-alkyl, ONO2, NO2, N3, NH2, aminoalkyl, aminoacid, aminoacyl, ONH2, O-aminoalkyl, O-aminoacid, O-aminoacyl, heterocycloalkyl, heterocycloalkaryl, aminoalkylamino, polyalkylamino, substituted silyl, or a group having Formula I, and R1, R2 or R3 serves as points of attachment to the siNA molecule of the invention.

[0098] In another embodiment, the invention features a compound having Formula VII, wherein R1 and R2 are hydroxyl (OH) groups, n=1, and R3 comprises 0 and is the point of attachment to the 3′-end, the 5′-end, or both of the 3′ and 5′-ends of one or both strands of a double-stranded siNA molecule of the invention or to a single-stranded siNA molecule of the invention. This modification is referred to herein as “glyceryl” (for example modification 6 in FIG. 10).

[0099] In another embodiment, a moiety having any of Formula V, VI or VII of the invention is at the 3′-end, the 5′-end, or both of the 3′ and 5′-ends of an siNA molecule of the invention. For example, a moiety having Formula V, VI or VII can be present at the 3′-end, the 5′-end, or both of the 3′ and 5′-ends of the antisense strand, the sense strand, or both antisense and sense strands of the siNA molecule. In addition, a moiety having Formula VII can be present at the 3′-end or the 5′-end of a hairpin siNA molecule as described herein.

[0100] In another embodiment, an siNA molecule of the invention comprises an abasic residue having Formula V or VI, wherein the abasic residue having Formula VI or VI is connected to the siNA construct in a 3′-3′,3′-2′,2′-3′, or 5′-5′ configuration, such as at the 3′-end, the 5′-end, or both of the 3′ and 5′-ends of one or both siNA strands.

[0101] In one embodiment, an siNA molecule of the invention comprises one or more (e.g., about 1, 2, 3, 4, 5, 6, 7, 8, 9, 10, or more) locked nucleic acid (LNA) nucleotides, for example at the 5′-end, the 3′-end, both of the 5′ and 3′-ends, or any combination thereof, of the siNA molecule.

[0102] In another embodiment, an siNA molecule of the invention comprises one or more (e.g., about 1, 2, 3, 4, 5, 6, 7, 8, 9, 10, or more) acyclic nucleotides, for example at the 5′-end, the 3′-end, both of the 5′ and 3′-ends, or any combination thereof, of the siNA molecule.

[0103] In one embodiment, the invention features a chemically modified short interfering nucleic acid (siNA) molecule of the invention comprising a sense region, wherein any (e.g., one or more or all) pyrimidine nucleotides present in the sense region are 2′-deoxy-2′-fluoro pyrimidine nucleotides (e.g., wherein all pyrimidine nucleotides are 2′-deoxy-2′-fluoro pyrimidine nucleotides or alternately a plurality of pyrimidine nucleotides are 2′-deoxy-2′-fluoro pyrimidine nucleotides), and wherein any (e.g., one or more or all) purine nucleotides present in the sense region are 2′-deoxy purine nucleotides (e.g., wherein all purine nucleotides are 2′-deoxy purine nucleotides or alternately a plurality of purine nucleotides are 2′-deoxy purine nucleotides).

[0104] In one embodiment, the invention features a chemically modified short interfering nucleic acid (siNA) molecule of the invention comprising a sense region, wherein any (e.g., one or more or all) pyrimidine nucleotides present in the sense region are 2′-deoxy-2′-fluoro pyrimidine nucleotides (e.g., wherein all pyrimidine nucleotides are 2′-deoxy-2′-fluoro pyrimidine nucleotides or alternately a plurality of pyrimidine nucleotides are 2′-deoxy-2′-fluoro pyrimidine nucleotides), and wherein any (e.g., one or more or all) purine nucleotides present in the sense region are 2′-deoxy purine nucleotides (e.g., wherein all purine nucleotides are 2′-deoxy purine nucleotides or alternately a plurality of purine nucleotides are 2′-deoxy purine nucleotides), wherein any nucleotides comprising a 3′-terminal nucleotide overhang that are present in said sense region are 2′-deoxy nucleotides.

[0105] In one embodiment, the invention features a chemically modified short interfering nucleic acid (siNA) molecule of the invention comprising a sense region, wherein any (e.g., one or more or all) pyrimidine nucleotides present in the sense region are 2′-deoxy-2′-fluoro pyrimidine nucleotides (e.g., wherein all pyrimidine nucleotides are 2′-deoxy-2′-fluoro pyrimidine nucleotides or alternately a plurality of pyrimidine nucleotides are 2′-deoxy-2′-fluoro pyrimidine nucleotides), and wherein any (e.g., one or more or all) purine nucleotides present in the sense region are 2′-O-methyl purine nucleotides (e.g., wherein all purine nucleotides are 2′-O-methyl purine nucleotides or alternately a plurality of purine nucleotides are 2′-O-methyl purine nucleotides).

[0106] In one embodiment, the invention features a chemically modified short interfering nucleic acid (siNA) molecule of the invention comprising a sense region, wherein any (e.g., one or more or all) pyrimidine nucleotides present in the sense region are 2′-deoxy-2′-fluoro pyrimidine nucleotides (e.g., wherein all pyrimidine nucleotides are 2′-deoxy-2′-fluoro pyrimidine nucleotides or alternately a plurality of pyrimidine nucleotides are 2′-deoxy-2′-fluoro pyrimidine nucleotides), wherein any (e.g., one or more or all) purine nucleotides present in the sense region are 2′-O-methyl purine nucleotides (e.g., wherein all purine nucleotides are 2′-O-methyl purine nucleotides or alternately a plurality of purine nucleotides are 2′-O-methyl purine nucleotides), and wherein any nucleotides comprising a 3′-terminal nucleotide overhang that are present in said sense region are 2′-deoxy nucleotides.

[0107] In one embodiment, the invention features a chemically modified short interfering nucleic acid (siNA) molecule of the invention comprising an antisense region, wherein any (e.g., one or more or all) pyrimidine nucleotides present in the antisense region are 2′-deoxy-2′-fluoro pyrimidine nucleotides (e.g., wherein all pyrimidine nucleotides are 2′-deoxy-2′-fluoro pyrimidine nucleotides or alternately a plurality of pyrimidine nucleotides are 2′-deoxy-2′-fluoro pyrimidine nucleotides), and wherein any (e.g., one or more or all) purine nucleotides present in the antisense region are 2′-O-methyl purine nucleotides (e.g., wherein all purine nucleotides are 2′-O-methyl purine nucleotides or alternately a plurality of purine nucleotides are 2′-O-methyl purine nucleotides).

[0108] In one embodiment, the invention features a chemically modified short interfering nucleic acid (siNA) molecule of the invention comprising an antisense region, wherein any (e.g., one or more or all) pyrimidine nucleotides present in the antisense region are 2′-deoxy-2′-fluoro pyrimidine nucleotides (e.g., wherein all pyrimidine nucleotides are 2′-deoxy-2′-fluoro pyrimidine nucleotides or alternately a plurality of pyrimidine nucleotides are 2′-deoxy-2′-fluoro pyrimidine nucleotides), wherein any (e.g., one or more or all) purine nucleotides present in the antisense region are 2′-O-methyl purine nucleotides (e.g., wherein all purine nucleotides are 2′-O-methyl purine nucleotides or alternately a plurality of purine nucleotides are 2′-O-methyl purine nucleotides), and wherein any nucleotides comprising a 3′-terminal nucleotide overhang that are present in said antisense region are 2′-deoxy nucleotides.

[0109] In one embodiment, the invention features a chemically modified short interfering nucleic acid (siNA) molecule of the invention comprising an antisense region, wherein any (e.g., one or more or all) pyrimidine nucleotides present in the antisense region are 2′-deoxy-2′-fluoro pyrimidine nucleotides (e.g., wherein all pyrimidine nucleotides are 2′-deoxy-2′-fluoro pyrimidine nucleotides or alternately a plurality of pyrimidine nucleotides are 2′-deoxy-2′-fluoro pyrimidine nucleotides), and wherein any (e.g., one or more or all) purine nucleotides present in the antisense region are 2′-deoxy purine nucleotides (e.g., wherein all purine nucleotides are 2′-deoxy purine nucleotides or alternately a plurality of purine nucleotides are 2′-deoxy purine nucleotides).

[0110] In one embodiment, the invention features a chemically modified short interfering nucleic acid (siNA) molecule of the invention comprising an antisense region, wherein any (e.g., one or more or all) pyrimidine nucleotides present in the antisense region are 2′-deoxy-2′-fluoro pyrimidine nucleotides (e.g., wherein all pyrimidine nucleotides are 2′-deoxy-2′-fluoro pyrimidine nucleotides or alternately a plurality of pyrimidine nucleotides are 2′-deoxy-2′-fluoro pyrimidine nucleotides), and wherein any (e.g., one or more or all) purine nucleotides present in the antisense region are 2′-O-methyl purine nucleotides (e.g., wherein all purine nucleotides are 2′-O-methyl purine nucleotides or alternately a plurality of purine nucleotides are 2′-O-methyl purine nucleotides).

[0111] In one embodiment, the invention features a chemically modified short interfering nucleic acid (siNA) molecule of the invention capable of mediating RNA interference (RNAi) against SARS inside a cell or reconstituted in vitro system comprising a sense region, wherein one or more pyrimidine nucleotides present in the sense region are 2′-deoxy-2′-fluoro pyrimidine nucleotides (e.g., wherein all pyrimidine nucleotides are 2′-deoxy-2′-fluoro pyrimidine nucleotides or alternately a plurality of pyrimidine nucleotides are 2′-deoxy-2′-fluoro pyrimidine nucleotides), and one or more purine nucleotides present in the sense region are 2′-deoxy purine nucleotides (e.g., wherein all purine nucleotides are 2′-deoxy purine nucleotides or alternately a plurality of purine nucleotides are 2′-deoxy purine nucleotides), and an antisense region, wherein one or more pyrimidine nucleotides present in the antisense region are 2′-deoxy-2′-fluoro pyrimidine nucleotides (e.g., wherein all pyrimidine nucleotides are 2′-deoxy-2′-fluoro pyrimidine nucleotides or alternately a plurality of pyrimidine nucleotides are 2′-deoxy-2′-fluoro pyrimidine nucleotides), and one or more purine nucleotides present in the antisense region are 2′-O-methyl purine nucleotides (e.g., wherein all purine nucleotides are 2′-O-methyl purine nucleotides or alternately a plurality of purine nucleotides are 2′-O-methyl purine nucleotides). The sense region and/or the antisense region can have a terminal cap modification, such as any modification described herein or shown in FIG. 10, that is optionally present at the 3′-end, the 5′-end, or both of the 3′ and 5′-ends of the sense and/or antisense sequence. The sense and/or antisense region can optionally further comprise a 3′-terminal nucleotide overhang having about 1 to about 4 (e.g., about 1, 2, 3, or 4) 2′-deoxynucleotides. The overhang nucleotides can further comprise one or more (e.g., about 1, 2, 3, 4 or more) phosphorothioate, phosphonoacetate, and/or thiophosphonoacetate internucleotide linkages. Non-limiting examples of these chemically modified siNAs are shown in FIGS. 4 and 5 and Tables III and IV herein. In any of these described embodiments, the purine nucleotides present in the sense region are alternatively 2′-O-methyl purine nucleotides (e.g., wherein all purine nucleotides are 2′-O-methyl purine nucleotides or alternately a plurality of purine nucleotides are 2′-O-methyl purine nucleotides) and one or more purine nucleotides present in the antisense region are 2′-β-methyl purine nucleotides (e.g., wherein all purine nucleotides are 2′-O-methyl purine nucleotides or alternately a plurality of purine nucleotides are 2′-O-methyl purine nucleotides). Also, in any of these embodiments, one or more purine nucleotides present in the sense region are alternatively purine ribonucleotides (e.g., wherein all purine nucleotides are purine ribonucleotides or alternately a plurality of purine nucleotides are purine ribonucleotides) and any purine nucleotides present in the antisense region are 2′-O-methyl purine nucleotides (e.g., wherein all purine nucleotides are 2′-O-methyl purine nucleotides or alternately a plurality of purine nucleotides are 2′-O-methyl purine nucleotides). Additionally, in any of these embodiments, one or more purine nucleotides present in the sense region and/or present in the antisense region are alternatively selected from the group consisting of 2′-deoxy nucleotides, locked nucleic acid (LNA) nucleotides, 2′-methoxyethyl nucleotides, 4′-thionucleotides, and 2′-O-methyl nucleotides (e.g., wherein all purine nucleotides are selected from the group consisting of 2′-deoxy nucleotides, locked nucleic acid (LNA) nucleotides, 2′-methoxyethyl nucleotides, 4′-thionucleotides, and 2′-O-methyl nucleotides or alternately a plurality of purine nucleotides are selected from the group consisting of 2′-deoxy nucleotides, locked nucleic acid (LNA) nucleotides, 2′-methoxyethyl nucleotides, 4′-thionucleotides, and 2′-O-methyl nucleotides).

[0112] In another embodiment, any modified nucleotides present in the siNA molecules of the invention, preferably in the antisense strand of the siNA molecules of the invention, but also optionally in the sense and/or both antisense and sense strands, comprise modified nucleotides having properties or characteristics similar to naturally occurring ribonucleotides. For example, the invention features siNA molecules including modified nucleotides having a Northern conformation (e.g., Northern pseudorotation cycle, see for example Saenger, Principles of Nucleic Acid Structure, Springer-Verlag ed., 1984). As such, chemically modified nucleotides present in the siNA molecules of the invention, preferably in the antisense strand of the siNA molecules of the invention, but also optionally in the sense and/or both antisense and sense strands, are resistant to nuclease degradation while at the same time maintaining the capacity to mediate RNAi. Non-limiting examples of nucleotides having a Northern configuration include locked nucleic acid (LNA) nucleotides (e.g., 2′-O, 4′-C-methylene-(D-ribofuranosyl) nucleotides); 2′-methoxyethoxy (MOE) nucleotides; 2′-methyl-thio-ethyl, 2′-deoxy-2′-fluoro nucleotides, 2′-deoxy-2′-chloro nucleotides, 2′-azido nucleotides, and 2′-O-methyl nucleotides.

[0113] In one embodiment, the sense strand of a double-stranded siNA molecule of the invention comprises a terminal cap moiety, (see for example FIG. 10) such as an inverted deoxyabasic moiety, at the 3′-end, 5′-end, or both 3′ and 5′-ends of the sense strand.

[0114] In one embodiment, the invention features a chemically modified short interfering nucleic acid molecule (siNA) capable of mediating RNA interference (RNAi) against SARS inside a cell or reconstituted in vitro system, wherein the chemical modification comprises a conjugate covalently attached to the chemically modified siNA molecule. Non-limiting examples of conjugates contemplated by the invention include conjugates and ligands described in Vargeese et al., U.S. Ser. No. 10/427,160, filed Apr. 30, 2003, incorporated by reference herein in its entirety, including the drawings. In another embodiment, the conjugate is covalently attached to the chemically modified siNA molecule via a biodegradable linker. In one embodiment, the conjugate molecule is attached at the 3′-end of either the sense strand, the antisense strand, or both strands of the chemically modified siNA molecule. In another embodiment, the conjugate molecule is attached at the 5′-end of either the sense strand, the antisense strand, or both strands of the chemically modified siNA molecule. In yet another embodiment, the conjugate molecule is attached both the 3′-end and 5′-end of either the sense strand, the antisense strand, or both strands of the chemically modified siNA molecule, or any combination thereof. In one embodiment, a conjugate molecule of the invention comprises a molecule that facilitates delivery of a chemically modified siNA molecule into a biological system, such as a cell. In another embodiment, the conjugate molecule attached to the chemically modified siNA molecule is a polyethylene glycol, human serum albumin, or a ligand for a cellular receptor that can mediate cellular uptake. Examples of specific conjugate molecules contemplated by the instant invention that can be attached to chemically modified siNA molecules are described in Vargeese et al., U.S. Ser. No. 10/201,394, filed Jul. 22, 2002, incorporated by reference herein. The type of conjugates used and the extent of conjugation of siNA molecules of the invention can be evaluated for improved pharmacokinetic profiles, bioavailability, and/or stability of siNA constructs while at the same time maintaining the ability of the siNA to mediate RNAi activity. As such, one skilled in the art can screen siNA constructs that are modified with various conjugates to determine whether the siNA conjugate complex possesses improved properties while maintaining the ability to mediate RNAi, for example in animal models as are generally known in the art.

[0115] In one embodiment, the invention features a short interfering nucleic acid (siNA) molecule of the invention, wherein the siNA further comprises a nucleotide, non-nucleotide, or mixed nucleotide/non-nucleotide linker that joins the sense region of the siNA to the antisense region of the siNA. In one embodiment, a nucleotide linker of the invention can be a linker of >2 nucleotides in length, for example about 3, 4, 5, 6, 7, 8, 9, or 10 nucleotides in length. In another embodiment, the nucleotide linker can be a nucleic acid aptamer. By “aptamer” or “nucleic acid aptamer” as used herein is meant a nucleic acid molecule that binds specifically to a target molecule wherein the nucleic acid molecule has sequence that comprises a sequence recognized by the target molecule in its natural setting. Alternately, an aptamer can be a nucleic acid molecule that binds to a target molecule where the target molecule does not naturally bind to a nucleic acid. The target molecule can be any molecule of interest. For example, the aptamer can be used to bind to a ligand-binding domain of a protein, thereby preventing interaction of the naturally occurring ligand with the protein. This is a non-limiting example and those in the art will recognize that other embodiments can be readily generated using techniques generally known in the art. (See, for example, Gold et al., 1995, Annu. Rev. Biochem., 64, 763; Brody and Gold, 2000, J. Biotechnol., 74, 5; Sun, 2000, Curr. Opin. Mol. Ther., 2, 100; Kusser, 2000, J. Biotechnol., 74, 27; Hermann and Patel, 2000, Science, 287, 820; and Jayasena, 1999, Clinical Chemistry, 45, 1628.)

[0116] In yet another embodiment, a non-nucleotide linker of the invention comprises abasic nucleotide, polyether, polyamine, polyamide, peptide, carbohydrate, lipid, polyhydrocarbon, or other polymeric compounds (e.g. polyethylene glycols such as those having between 2 and 100 ethylene glycol units). Specific examples include those described by Seela and Kaiser, Nucleic Acids Res. 1990, 18:6353 and Nucleic Acids Res. 1987, 15:3113; Cload and Schepartz, J. Am. Chem. Soc. 1991, 113:6324; Richardson and Schepartz, J. Am. Chem. Soc. 1991, 113:5109; Ma et al., Nucleic Acids Res. 1993, 21:2585 and Biochemistry 1993, 32:1751; Durand et al., Nucleic Acids Res. 1990, 18:6353; McCurdy et al., Nucleosides & Nucleotides 1991, 10:287; Jschke et al., Tetrahedron Lett. 1993, 34:301; Ono et al., Biochemistry 1991, 30:9914; Arnold et al., International Publication No. WO 89/02439; Usman et al., International Publication No. WO 95/06731; Dudycz et al., International Publication No. WO 95/11910 and Ferentz and Verdine, J. Am. Chem. Soc. 1991, 113:4000, all hereby incorporated by reference herein. A “non-nucleotide” further means any group or compound that can be incorporated into a nucleic acid chain in the place of one or more nucleotide units, including either sugar and/or phosphate substitutions, and allows the remaining bases to exhibit their enzymatic activity. The group or compound can be abasic in that it does not contain a commonly recognized nucleotide base, such as adenosine, guanine, cytosine, uracil or thymine, for example at the C1 position of the sugar.

[0117] In one embodiment, the invention features a short interfering nucleic acid (siNA) molecule capable of mediating RNA interference (RNAi) inside a cell or reconstituted in vitro system, wherein one or both strands of the siNA molecule that are assembled from two separate oligonucleotides do not comprise any ribonucleotides. For example, an siNA molecule can be assembled from a single oligonucleotide where the sense and antisense regions of the siNA comprise separate oligonucleotides not having any ribonucleotides (e.g., nucleotides having a 2′-OH group) present in the oligonucleotides. In another example, an siNA molecule can be assembled from a single oligonucleotide where the sense and antisense regions of the siNA are linked or circularized by a nucleotide or non-nucleotide linker as described herein, wherein the oligonucleotide does not have any ribonucleotides (e.g., nucleotides having a 2′-OH group) present in the oligonucleotide. Applicant has surprisingly found that the presence of ribonucleotides (e.g., nucleotides having a 2′-hydroxyl group) within the siNA molecule is not required or essential to support RNAi activity. As such, in one embodiment, all positions within the siNA can include chemically modified nucleotides and/or non-nucleotides such as nucleotides and or non-nucleotides having Formula I, II, III, IV, V, VI, or VII or any combination thereof to the extent that the ability of the siNA molecule to support RNAi activity in a cell is maintained.

[0118] In one embodiment, an siNA molecule of the invention is a single-stranded siNA molecule that mediates RNAi activity in a cell or reconstituted in vitro system comprising a single-stranded polynucleotide having complementarity to a target nucleic acid sequence. In another embodiment, the single-stranded siNA molecule of the invention comprises a 5′-terminal phosphate group. In another embodiment, the single-stranded siNA molecule of the invention comprises a 5′-terminal phosphate group and a 3′-terminal phosphate group (e.g., a 2′,3′-cyclic phosphate). In another embodiment, the single-stranded siNA molecule of the invention comprises about 19 to about 29 (e.g., about 19, 20, 21, 22, 23, 24, 25, 26, 27, 28, or 29) nucleotides. In yet another embodiment, the single-stranded siNA molecule of the invention comprises one or more chemically modified nucleotides or non-nucleotides described herein. For example, all the positions within the siNA molecule can include chemically modified nucleotides such as nucleotides having any of Formulae I-VII, or any combination thereof to the extent that the ability of the siNA molecule to support RNAi activity in a cell is maintained.

[0119] In one embodiment, an siNA molecule of the invention is a single-stranded siNA molecule that mediates RNAi activity in a cell or reconstituted in vitro system comprising a single-stranded polynucleotide having complementarity to a target nucleic acid sequence, wherein one or more pyrimidine nucleotides present in the siNA are 2′-deoxy-2′-fluoro pyrimidine nucleotides (e.g., wherein all pyrimidine nucleotides are 2′-deoxy-2′-fluoro pyrimidine nucleotides or alternately a plurality of pyrimidine nucleotides are 2′-deoxy-2′-fluoro pyrimidine nucleotides), and wherein any purine nucleotides present in the antisense region are 2′-O-methyl purine nucleotides (e.g., wherein all purine nucleotides are 2′-O-methyl purine nucleotides or alternately a plurality of purine nucleotides are 2′-O-methyl purine nucleotides), and a terminal cap modification, such as any modification described herein or shown in FIG. 10, that is optionally present at the 3′-end and/or the 5′-end. The siNA optionally further comprises about 1 to about 4 or more (e.g., about 1, 2, 3, 4 or more) terminal 2′-deoxynucleotides at the 3′-end of the siNA molecule, wherein the terminal nucleotides can further comprise one or more (e.g., 1, 2, 3, 4 or more) phosphorothioate, phosphonoacetate, and/or thiophosphonoacetate internucleotide linkages, and wherein the siNA optionally further comprises a terminal phosphate group, such as a 5′-terminal phosphate group. In any of these embodiments, any purine nucleotides present in the antisense region are alternatively 2′-deoxy purine nucleotides (e.g., wherein all purine nucleotides are 2′-deoxy purine nucleotides or alternately a plurality of purine nucleotides are 2′-deoxy purine nucleotides). Also, in any of these embodiments, any purine nucleotides present in the siNA (i.e., purine nucleotides present in the sense and/or antisense region) can alternatively be locked nucleic acid (LNA) nucleotides (e.g., wherein all purine nucleotides are LNA nucleotides or alternately a plurality of purine nucleotides are LNA nucleotides). Also, in any of these embodiments, any purine nucleotides present in the siNA are alternatively 2′-methoxyethyl purine nucleotides (e.g., wherein all purine nucleotides are 2′-methoxyethyl purine nucleotides or alternately a plurality of purine nucleotides are 2′-methoxyethyl purine nucleotides). In another embodiment, any modified nucleotides present in the single-stranded siNA molecules of the invention comprise modified nucleotides having properties or characteristics similar to naturally occurring ribonucleotides. For example, the invention features siNA molecules including modified nucleotides having a Northern conformation (e.g., Northern pseudorotation cycle, see for example Saenger, Principles of Nucleic Acid Structure, Springer-Verlag ed., 1984). As such, chemically modified nucleotides present in the single-stranded siNA molecules of the invention are preferably resistant to nuclease degradation while at the same time maintaining the capacity to mediate RNAi.

[0120] In one embodiment, the invention features a method for modulating the expression of a SARS gene within a cell comprising: (a) synthesizing an siNA molecule of the invention, which can be chemically modified, wherein one of the siNA strands comprises a sequence complementary to RNA of the SARS gene; and (b) introducing the siNA molecule into a cell under conditions suitable to modulate the expression of the SARS gene in the cell.

[0121] In one embodiment, the invention features a method for modulating the expression of a SARS gene within a cell comprising: (a) synthesizing an siNA molecule of the invention, which can be chemically modified, wherein one of the siNA strands comprises a sequence complementary to RNA of the SARS gene and wherein the sense strand sequence of the siNA comprises a sequence identical or substantially similar to the sequence of the target RNA; and (b) introducing the siNA molecule into a cell under conditions suitable to modulate the expression of the SARS gene in the cell.

[0122] In another embodiment, the invention features a method for modulating the expression of more than one SARS gene within a cell comprising: (a) synthesizing siNA molecules of the invention, which can be chemically modified, wherein one of the siNA strands comprises a sequence complementary to RNA of the SARS genes; and (b) introducing the siNA molecules into a cell under conditions suitable to modulate the expression of the SARS genes in the cell.

[0123] In another embodiment, the invention features a method for modulating the expression of two or more SARS genes within a cell comprising: (a) synthesizing one or more siNA molecules of the invention, which can be chemically modified, wherein the siNA strands comprise sequences complementary to RNA of the SARS genes and wherein the sense strand sequences of the siNAs comprise sequences identical or substantially similar to the sequences of the target RNAs; and (b) introducing the siNA molecules into a cell under conditions suitable to modulate the expression of the SARS genes in the cell.

[0124] In another embodiment, the invention features a method for modulating the expression of more than one SARS gene within a cell comprising: (a) synthesizing an siNA molecule of the invention, which can be chemically modified, wherein one of the siNA strands comprises a sequence complementary to RNA of the SARS gene and wherein the sense strand sequence of the siNA comprises a sequence identical or substantially similar to the sequences of the target RNAs; and (b) introducing the siNA molecule into a cell under conditions suitable to modulate the expression of the SARS genes in the cell.

[0125] In one embodiment, siNA molecules of the invention are used as reagents in ex vivo applications. For example, siNA reagents are introduced into tissue or cells that are transplanted into a subject for therapeutic effect. The cells and/or tissue can be derived from an organism or subject that later receives the explant, or can be derived from another organism or subject prior to transplantation. The siNA molecules can be used to modulate the expression of one or more genes in the cells or tissue, such that the cells or tissue obtain a desired phenotype or are able to perform a function when transplanted in vivo. In one embodiment, certain target cells from a patient are extracted. These extracted cells are contacted with siNAs targeting a specific nucleotide sequence within the cells under conditions suitable for uptake of the siNAs by these cells (e.g. using delivery reagents such as cationic lipids, liposomes and the like or using techniques such as electroporation to facilitate the delivery of siNAs into cells). The cells are then reintroduced back into the same patient or other patients. In one embodiment, the invention features a method of modulating the expression of a SARS gene in a tissue explant comprising: (a) synthesizing an siNA molecule of the invention, which can be chemically modified, wherein one of the siNA strands comprises a sequence complementary to RNA of the SARS gene; and (b) introducing the siNA molecule into a cell of the tissue explant derived from a particular organism under conditions suitable to modulate the expression of the SARS gene in the tissue explant. In another embodiment, the method further comprises introducing the tissue explant back into the organism the tissue was derived from or into another organism under conditions suitable to modulate the expression of the SARS gene in that organism.

[0126] In one embodiment, the invention features a method of modulating the expression of a SARS gene in a tissue explant comprising: (a) synthesizing an siNA molecule of the invention, which can be chemically modified, wherein one of the siNA strands comprises a sequence complementary to RNA of the SARS gene and wherein the sense strand sequence of the siNA comprises a sequence identical or substantially similar to the sequence of the target RNA; and (b) introducing the siNA molecule into a cell of the tissue explant derived from a particular organism under conditions suitable to modulate the expression of the SARS gene in the tissue explant. In another embodiment, the method further comprises introducing the tissue explant back into the organism the tissue was derived from or into another organism under conditions suitable to modulate the expression of the SARS gene in that organism.

[0127] In another embodiment, the invention features a method of modulating the expression of more than one SARS gene in a tissue explant comprising: (a) synthesizing siNA molecules of the invention, which can be chemically modified, wherein one of the siNA strands comprises a sequence complementary to RNA of the SARS genes; and (b) introducing the siNA molecules into a cell of the tissue explant derived from a particular organism under conditions suitable to modulate the expression of the SARS genes in the tissue explant. In another embodiment, the method further comprises introducing the tissue explant back into the organism the tissue was derived from or into another organism under conditions suitable to modulate the expression of the SARS genes in that organism.

[0128] In one embodiment, the invention features a method of modulating the expression of a SARS gene in an organism comprising: (a) synthesizing an siNA molecule of the invention, which can be chemically modified, wherein one of the siNA strands comprises a sequence complementary to RNA of the SARS gene; and (b) introducing the siNA molecule into the organism under conditions suitable to modulate the expression of the SARS gene in the organism. The level of SARS protein or RNA can be determined as is known in the art.

[0129] In another embodiment, the invention features a method of modulating the expression of more than one SARS gene in an organism comprising: (a) synthesizing siNA molecules of the invention, which can be chemically modified, wherein one of the siNA strands comprises a sequence complementary to RNA of the SARS genes; and (b) introducing the siNA molecules into the organism under conditions suitable to modulate the expression of the SARS genes in the organism. The level of SARS protein or RNA can be determined as is known in the art.

[0130] In one embodiment, the invention features a method for modulating the expression of a SARS gene within a cell comprising: (a) synthesizing an siNA molecule of the invention, which can be chemically modified, wherein the siNA comprises a single-stranded sequence having complementarity to RNA of the SARS gene; and (b) introducing the siNA molecule into a cell under conditions suitable to modulate the expression of the SARS gene in the cell.

[0131] In another embodiment, the invention features a method for modulating the expression of more than one SARS gene within a cell comprising: (a) synthesizing siNA molecules of the invention, which can be chemically modified, wherein the siNA comprises a single-stranded sequence having complementarity to RNA of the SARS gene; and (b) contacting the cell in vitro or in vivo with the siNA molecule under conditions suitable to modulate the expression of the SARS genes in the cell.

[0132] In one embodiment, the invention features a method of modulating the expression of a SARS gene in a tissue explant comprising: (a) synthesizing an siNA molecule of the invention, which can be chemically modified, wherein the siNA comprises a single-stranded sequence having complementarity to RNA of the SARS gene; and (b) contacting the cell of the tissue explant derived from a particular organism with the siNA molecule under conditions suitable to modulate the expression of the SARS gene in the tissue explant. In another embodiment, the method further comprises introducing the tissue explant back into the organism the tissue was derived from or into another organism under conditions suitable to modulate the expression of the SARS gene in that organism.

[0133] In another embodiment, the invention features a method of modulating the expression of more than one SARS gene in a tissue explant comprising: (a) synthesizing siNA molecules of the invention, which can be chemically modified, wherein the siNA comprises a single-stranded sequence having complementarity to RNA of the SARS gene; and (b) introducing the siNA molecules into a cell of the tissue explant derived from a particular organism under conditions suitable to modulate the expression of the SARS genes in the tissue explant. In another embodiment, the method further comprises introducing the tissue explant back into the organism the tissue was derived from or into another organism under conditions suitable to modulate the expression of the SARS genes in that organism.

[0134] In one embodiment, the invention features a method of modulating the expression of a SARS gene in an organism comprising: (a) synthesizing an siNA molecule of the invention, which can be chemically modified, wherein the siNA comprises a single-stranded sequence having complementarity to RNA of the SARS gene; and (b) introducing the siNA molecule into the organism under conditions suitable to modulate the expression of the SARS gene in the organism.

[0135] In another embodiment, the invention features a method of modulating the expression of more than one SARS gene in an organism comprising: (a) synthesizing siNA molecules of the invention, which can be chemically modified, wherein the siNA comprises a single-stranded sequence having complementarity to RNA of the SARS gene; and (b) introducing the siNA molecules into the organism under conditions suitable to modulate the expression of the SARS genes in the organism.

[0136] In one embodiment, the invention features a method of modulating the expression of a SARS gene in an organism comprising contacting the organism with an siNA molecule of the invention under conditions suitable to modulate the expression of the SARS gene in the organism.

[0137] In another embodiment, the invention features a method of modulating the expression of more than one SARS gene in an organism comprising contacting the organism with one or more siNA molecules of the invention under conditions suitable to modulate the expression of the SARS genes in the organism.

[0138] The siNA molecules of the invention can be designed to down regulate or inhibit target (e.g., SARS) gene expression through RNAi targeting of a variety of RNA molecules. In one embodiment, the siNA molecules of the invention are used to target various RNAs corresponding to a target gene. Non-limiting examples of such RNAs include messenger RNA (mRNA), alternate RNA splice variants of target gene(s), post-transcriptionally modified RNA of target gene(s), pre-mRNA of target gene(s), and/or RNA templates. If alternate splicing produces a family of transcripts that are distinguished by usage of appropriate exons, the instant invention can be used to inhibit gene expression through the appropriate exons to specifically inhibit or to distinguish among the functions of gene family members. For example, a protein that contains an alternatively spliced transmembrane domain can be expressed in both membrane bound and secreted forms. Use of the invention to target the exon containing the transmembrane domain can be used to determine the functional consequences of pharmaceutical targeting of membrane bound as opposed to the secreted form of the protein. Non-limiting examples of applications of the invention relating to targeting these RNA molecules include therapeutic pharmaceutical applications, pharmaceutical discovery applications, molecular diagnostic and gene function applications, and gene mapping, for example using single nucleotide polymorphism mapping with siNA molecules of the invention. Such applications can be implemented using known gene sequences or from partial sequences available from an expressed sequence tag (EST).

[0139] In another embodiment, the siNA molecules of the invention are used to target conserved sequences corresponding to a gene family or gene families such as SARS family genes. As such, siNA molecules targeting multiple SARS targets can provide increased therapeutic effect. In addition, siNA can be used to characterize pathways of gene function in a variety of applications. For example, the present invention can be used to inhibit the activity of target gene(s) in a pathway to determine the function of uncharacterized gene(s) in gene function analysis, mRNA function analysis, or translational analysis. The invention can be used to determine potential target gene pathways involved in various diseases and conditions toward pharmaceutical development. The invention can be used to understand pathways of gene expression involved in, for example, the progression and/or maintenance of SARS virus infection, acute respiratory failure, viral pneumonia, and other indications that can respond to the level of SARS in a cell or tissue.

[0140] In one embodiment, siNA molecule(s) and/or methods of the invention are used to down regulate the expression of gene(s) that encode RNA referred to by Genbank Accession Nos., for example SARS genes encoding RNA sequence(s) referred to herein by Genbank Accession number, for example, Genbank Accession Nos. shown in Table I.

[0141] In one embodiment, the invention features a method comprising: (a) generating a library of siNA constructs having a predetermined complexity; and (b) assaying the siNA constructs of (a) above, under conditions suitable to determine RNAi target sites within the target RNA sequence. In one embodiment, the siNA molecules of (a) have strands of a fixed length, for example, about 23 nucleotides in length. In another embodiment, the siNA molecules of (a) are of differing length, for example having strands of about 19 to about 25 (e.g., about 19, 20, 21, 22, 23, 24, or 25) nucleotides in length. In one embodiment, the assay can comprise a reconstituted in vitro siNA assay as described herein. In another embodiment, the assay can comprise a cell culture system in which target RNA is expressed. In another embodiment, fragments of target RNA are analyzed for detectable levels of cleavage, for example by gel electrophoresis, Northern blot analysis, or RNAse protection assays, to determine the most suitable target site(s) within the target RNA sequence. The target RNA sequence can be obtained as is known in the art, for example, by cloning and/or transcription for in vitro systems, and by cellular expression in in vivo systems.

[0142] In one embodiment, the invention features a method comprising: (a) generating a randomized library of siNA constructs having a predetermined complexity, such as of 4N, where N represents the number of base paired nucleotides in each of the siNA construct strands (e.g., for an siNA construct having 21 nucleotide sense and antisense strands with 19 base pairs, the complexity would be 419); and (b) assaying the siNA constructs of (a) above, under conditions suitable to determine RNAi target sites within the target SARS RNA sequence. In another embodiment, the siNA molecules of (a) have strands of a fixed length, for example about 23 nucleotides in length. In yet another embodiment, the siNA molecules of (a) are of differing length, for example having strands of about 19 to about 25 (e.g., about 19, 20, 21, 22, 23, 24, or 25) nucleotides in length. In one embodiment, the assay can comprise a reconstituted in vitro siNA assay as described in Example 7 herein. In another embodiment, the assay can comprise a cell culture system in which target RNA is expressed. In another embodiment, fragments of SARS RNA are analyzed for detectable levels of cleavage, for example by gel electrophoresis, Northern blot analysis, or RNAse protection assays, to determine the most suitable target site(s) within the target SARS RNA sequence. The target SARS RNA sequence can be obtained as is known in the art, for example, by cloning and/or transcription for in vitro systems, and by cellular expression in in vivo systems.

[0143] In another embodiment, the invention features a method comprising: (a) analyzing the sequence of a RNA target encoded by a target gene; (b) synthesizing one or more sets of siNA molecules having sequence complementary to one or more regions of the RNA of (a); and (c) assaying the siNA molecules of (b) under conditions suitable to determine RNAi targets within the target RNA sequence. In one embodiment, the siNA molecules of (b) have strands of a fixed length, for example about 23 nucleotides in length. In another embodiment, the siNA molecules of (b) are of differing length, for example having strands of about 19 to about 25 (e.g., about 19, 20, 21, 22, 23, 24, or 25) nucleotides in length. In one embodiment, the assay can comprise a reconstituted in vitro siNA assay as described herein. In another embodiment, the assay can comprise a cell culture system in which target RNA is expressed. Fragments of target RNA are analyzed for detectable levels of cleavage, for example by gel electrophoresis, Northern blot analysis, or RNAse protection assays, to determine the most suitable target site(s) within the target RNA sequence. The target RNA sequence can be obtained as is known in the art, for example, by cloning and/or transcription for in vitro systems, and by expression in in vivo systems.

[0144] By “target site” is meant a sequence within a target RNA that is “targeted” for cleavage mediated by an siNA construct which contains sequences within its antisense region that are complementary to the target sequence.

[0145] By “detectable level of cleavage” is meant cleavage of target RNA (and formation of cleaved product RNAs) to an extent sufficient to discern cleavage products above the background of RNAs produced by random degradation of the target RNA. Production of cleavage products from 1-5% of the target RNA is sufficient to detect above the background for most methods of detection.

[0146] In one embodiment, the invention features a composition comprising an siNA molecule of the invention, which can be chemically modified, in a pharmaceutically acceptable carrier or diluent. In another embodiment, the invention features a pharmaceutical composition comprising siNA molecules of the invention, which can be chemically modified, targeting one or more genes in a pharmaceutically acceptable carrier or diluent. In another embodiment, the invention features a method for diagnosing a disease or condition in a subject comprising administering to the subject a composition of the invention under conditions suitable for the diagnosis of the disease or condition in the subject. In another embodiment, the invention features a method for treating or preventing a disease or condition in a subject, comprising administering to the subject a composition of the invention under conditions suitable for the treatment or prevention of the disease or condition in the subject, alone or in conjunction with one or more other therapeutic compounds. In yet another embodiment, the invention features a method for reducing or preventing tissue rejection in a subject comprising administering to the subject a composition of the invention under conditions suitable for the reduction or prevention of tissue rejection in the subject.

[0147] In another embodiment, the invention features a method for validating a SARS gene target, comprising: (a) synthesizing an siNA molecule of the invention, which can be chemically modified, wherein one of the siNA strands includes a sequence complementary to RNA of a SARS target gene; (b) introducing the siNA molecule into a cell, tissue, or organism under conditions suitable for modulating expression of the SARS target gene in the cell, tissue, or organism; and (c) determining the function of the gene by assaying for any phenotypic change in the cell, tissue, or organism.

[0148] In another embodiment, the invention features a method for validating a SARS target comprising: (a) synthesizing an siNA molecule of the invention, which can be chemically modified, wherein one of the siNA strands includes a sequence complementary to RNA of a SARS target gene; (b) introducing the siNA molecule into a biological system under conditions suitable for modulating expression of the SARS target gene in the biological system; and (c) determining the function of the gene by assaying for any phenotypic change in the biological system.

[0149] By “biological system” is meant, material, in a purified or unpurified form, from biological sources, including but not limited to human or animal, wherein the system comprises the components required for RNAi activity. The term “biological system” includes, for example, a cell, tissue, or organism, or extract thereof. The term biological system also includes reconstituted RNAi systems that can be used in an in vitro setting.

[0150] By “phenotypic change” is meant any detectable change to a cell that occurs in response to contact or treatment with a nucleic acid molecule of the invention (e.g., siNA). Such detectable changes include, but are not limited to, changes in shape, size, proliferation, motility, protein expression or RNA expression or other physical or chemical changes as can be assayed by methods known in the art. The detectable change can also include expression of reporter genes/molecules such as Green Florescent Protein (GFP) or various tags that are used to identify an expressed protein or any other cellular component that can be assayed.

[0151] In one embodiment, the invention features a kit containing an siNA molecule of the invention, which can be chemically modified, that can be used to modulate the expression of a SARS target gene in a biological system, including, for example, in a cell, tissue, or organism. In another embodiment, the invention features a kit containing more than one siNA molecule of the invention, which can be chemically modified, that can be used to modulate the expression of more than one SARS target gene in a biological system, including, for example, in a cell, tissue, or organism.

[0152] In one embodiment, the invention features a cell containing one or more siNA molecules of the invention, which can be chemically modified. In another embodiment, the cell containing an siNA molecule of the invention is a mammalian cell. In yet another embodiment, the cell containing an siNA molecule of the invention is a human cell.

[0153] In one embodiment, the synthesis of an siNA molecule of the invention, which can be chemically modified, comprises: (a) synthesis of two complementary strands of the siNA molecule; (b) annealing the two complementary strands together under conditions suitable to obtain a double-stranded siNA molecule. In another embodiment, synthesis of the two complementary strands of the siNA molecule is by solid phase oligonucleotide synthesis. In yet another embodiment, synthesis of the two complementary strands of the siNA molecule is by solid phase tandem oligonucleotide synthesis.

[0154] In one embodiment, the invention features a method for synthesizing an siNA duplex molecule comprising: (a) synthesizing a first oligonucleotide sequence strand of the siNA molecule, wherein the first oligonucleotide sequence strand comprises a cleavable linker molecule that can be used as a scaffold for the synthesis of the second oligonucleotide sequence strand of the siNA; (b) synthesizing the second oligonucleotide sequence strand of siNA on the scaffold of the first oligonucleotide sequence strand, wherein the second oligonucleotide sequence strand further comprises a chemical moiety than can be used to purify the siNA duplex; (c) cleaving the linker molecule of (a) under conditions suitable for the two siNA oligonucleotide strands to hybridize and form a stable duplex; and (d) purifying the siNA duplex utilizing the chemical moiety of the second oligonucleotide sequence strand. In one embodiment, cleavage of the linker molecule in (c) above takes place during deprotection of the oligonucleotide, for example under hydrolysis conditions using an alkylamine base such as methylamine. In one embodiment, the method of synthesis comprises solid phase synthesis on a solid support such as controlled pore glass (CPG) or polystyrene, wherein the first sequence of (a) is synthesized on a cleavable linker, such as a succinyl linker, using the solid support as a scaffold. The cleavable linker in (a) used as a scaffold for synthesizing the second strand can comprise similar reactivity as the solid support derivatized linker, such that cleavage of the solid support derivatized linker and the cleavable linker of (a) takes place concomitantly. In another embodiment, the chemical moiety of (b) that can be used to isolate the attached oligonucleotide sequence comprises a trityl group, for example a dimethoxytrityl group, which can be employed in a trityl-on synthesis strategy as described herein. In yet another embodiment, the chemical moiety, such as a dimethoxytrityl group, is removed during purification, for example, using acidic conditions.

[0155] In a further embodiment, the method for siNA synthesis is a solution phase synthesis or hybrid phase synthesis wherein both strands of the siNA duplex are synthesized in tandem using a cleavable linker attached to the first sequence which acts a scaffold for synthesis of the second sequence. Cleavage of the linker under conditions suitable for hybridization of the separate siNA sequence strands results in formation of the double-stranded siNA molecule.

[0156] In another embodiment, the invention features a method for synthesizing an siNA duplex molecule comprising: (a) synthesizing one oligonucleotide sequence strand of the siNA molecule, wherein the sequence comprises a cleavable linker molecule that can be used as a scaffold for the synthesis of another oligonucleotide sequence; (b) synthesizing a second oligonucleotide sequence having complementarity to the first sequence strand on the scaffold of (a), wherein the second sequence comprises the other strand of the double-stranded siNA molecule and wherein the second sequence further comprises a chemical moiety than can be used to isolate the attached oligonucleotide sequence; (c) purifying the product of (b) utilizing the chemical moiety of the second oligonucleotide sequence strand under conditions suitable for isolating the full-length sequence comprising both siNA oligonucleotide strands connected by the cleavable linker and under conditions suitable for the two siNA oligonucleotide strands to hybridize and form a stable duplex. In one embodiment, cleavage of the linker molecule in (c) above takes place during deprotection of the oligonucleotide, for example under hydrolysis conditions. In another embodiment, cleavage of the linker molecule in (c) above takes place after deprotection of the oligonucleotide. In another embodiment, the method of synthesis comprises solid phase synthesis on a solid support such as controlled pore glass (CPG) or polystyrene, wherein the first sequence of (a) is synthesized on a cleavable linker, such as a succinyl linker, using the solid support as a scaffold. The cleavable linker in (a) used as a scaffold for synthesizing the second strand can comprise similar reactivity or differing reactivity as the solid support derivatized linker, such that cleavage of the solid support derivatized linker and the cleavable linker of (a) takes place either concomitantly or sequentially. In one embodiment, the chemical moiety of (b) that can be used to isolate the attached oligonucleotide sequence comprises a trityl group, for example a dimethoxytrityl group.

[0157] In another embodiment, the invention features a method for making a double-stranded siNA molecule in a single synthetic process comprising: (a) synthesizing an oligonucleotide having a first and a second sequence, wherein the first sequence is complementary to the second sequence, and the first oligonucleotide sequence is linked to the second sequence via a cleavable linker, and wherein a terminal 5′-protecting group, for example, a 5′-O-dimethoxytrityl group (5′-O-DMT) remains on the oligonucleotide having the second sequence; (b) deprotecting the oligonucleotide whereby the deprotection results in the cleavage of the linker joining the two oligonucleotide sequences; and (c) purifying the product of (b) under conditions suitable for isolating the double-stranded siNA molecule, for example using a trityl-on synthesis strategy as described herein.

[0158] In another embodiment, the method of synthesis of siNA molecules of the invention comprises the teachings of Scaringe et al., U.S. Pat. Nos. 5,889,136; 6,008,400; and 6,111,086, incorporated by reference herein in their entirety.

[0159] In one embodiment, the invention features siNA constructs that mediate RNAi against SARS, wherein the siNA construct comprises one or more chemical modifications, for example, one or more chemical modifications having any of Formulae I-VII or any combination thereof that increases the nuclease resistance of the siNA construct.

[0160] In another embodiment, the invention features a method for generating siNA molecules with increased nuclease resistance comprising (a) introducing nticleotides having any of Formula I-VII or any combination thereof into an siNA molecule, and (b) assaying the siNA molecule of step (a) under conditions suitable for isolating siNA molecules having increased nuclease resistance.

[0161] In one embodiment, the invention features siNA constructs that mediate RNAi against SARS, wherein the siNA construct comprises one or more chemical modifications described herein that modulates the binding affinity between the sense and antisense strands of the siNA construct.

[0162] In another embodiment, the invention features a method for generating siNA molecules with increased binding affinity between the sense and antisense strands of the siNA molecule comprising (a) introducing nucleotides having any of Formula I-VII or any combination thereof into an siNA molecule, and (b) assaying the siNA molecule of step (a) under conditions suitable for isolating siNA molecules having increased binding affinity between the sense and antisense strands of the siNA molecule.

[0163] In one embodiment, the invention features siNA constructs that mediate RNAi against SARS, wherein the siNA construct comprises one or more chemical modifications described herein that modulates the binding affinity between the antisense strand of the siNA construct and a complementary target RNA sequence within a cell.

[0164] In one embodiment, the invention features siNA constructs that mediate RNAi against SARS, wherein the siNA construct comprises one or more chemical modifications described herein that modulates the binding affinity between the antisense strand of the siNA construct and a complementary target DNA sequence within a cell.

[0165] In another embodiment, the invention features a method for generating siNA molecules with increased binding affinity between the antisense strand of the siNA molecule and a complementary target RNA sequence comprising (a) introducing nucleotides having any of Formula I-VII or any combination thereof into an siNA molecule, and (b) assaying the siNA molecule of step (a) under conditions suitable for isolating siNA molecules having increased binding affinity between the antisense strand of the siNA molecule and a complementary target RNA sequence.

[0166] In another embodiment, the invention features a method for generating siNA molecules with increased binding affinity between the antisense strand of the siNA molecule and a complementary target DNA sequence comprising (a) introducing nucleotides having any of Formula I-VII or any combination thereof into an siNA molecule, and (b) assaying the siNA molecule of step (a) under conditions suitable for isolating siNA molecules having increased binding affinity between the antisense strand of the siNA molecule and a complementary target DNA sequence.

[0167] In one embodiment, the invention features siNA constructs that mediate RNAi against SARS, wherein the siNA construct comprises one or more chemical modifications described herein that modulate the polymerase activity of a cellular polymerase capable of generating additional endogenous siNA molecules having sequence homology to the chemically modified siNA construct.

[0168] In another embodiment, the invention features a method for generating siNA molecules capable of mediating increased polymerase activity of a cellular polymerase capable of generating additional endogenous siNA molecules having sequence homology to a chemically modified siNA molecule comprising (a) introducing nucleotides having any of Formula I-VII or any combination thereof into an siNA molecule, and (b) assaying the siNA molecule of step (a) under conditions suitable for isolating siNA molecules capable of mediating increased polymerase activity of a cellular polymerase capable of generating additional endogenous siNA molecules having sequence homology to the chemically modified siNA molecule.

[0169] In one embodiment, the invention features chemically modified siNA constructs that mediate RNAi against SARS in a cell, wherein the chemical modifications do not significantly effect the interaction of siNA with a target RNA molecule, DNA molecule and/or proteins or other factors that are essential for RNAi in a manner that would decrease the efficacy of RNAi mediated by such siNA constructs.

[0170] In another embodiment, the invention features a method for generating siNA molecules with improved RNAi activity against SARS comprising (a) introducing nucleotides having any of Formula I-VII or any combination thereof into an siNA molecule, and (b) assaying the siNA molecule of step (a) under conditions suitable for isolating siNA molecules having improved RNAi activity.

[0171] In yet another embodiment, the invention features a method for generating siNA molecules with improved RNAi activity against SARS target RNA comprising (a) introducing nucleotides having any of Formula I-VII or any combination thereof into an siNA molecule, and (b) assaying the siNA molecule of step (a) under conditions suitable for isolating siNA molecules having improved RNAi activity against the target RNA.

[0172] In yet another embodiment, the invention features a method for generating siNA molecules with improved RNAi activity against SARS target DNA comprising (a) introducing nucleotides having any of Formula I-VII or any combination thereof into an siNA molecule, and (b) assaying the siNA molecule of step (a) under conditions suitable for isolating siNA molecules having improved RNAi activity against the target DNA.

[0173] In one embodiment, the invention features siNA constructs that mediate RNAi against SARS, wherein the siNA construct comprises one or more chemical modifications described herein that modulates the cellular uptake of the siNA construct.

[0174] In another embodiment, the invention features a method for generating siNA molecules against SARS with improved cellular uptake comprising (a) introducing nucleotides having any of Formula I-VII or any combination thereof into an siNA molecule, and (b) assaying the siNA molecule of step (a) under conditions suitable for isolating siNA molecules having improved cellular uptake.

[0175] In one embodiment, the invention features siNA constructs that mediate RNAi against SARS, wherein the siNA construct comprises one or more chemical modifications described herein that increases the bioavailability of the siNA construct, for example, by attaching polymeric conjugates such as polyethyleneglycol or equivalent conjugates that improve the pharmacokinetics of the siNA construct, or by attaching conjugates that target specific tissue types or cell types in vivo. Non-limiting examples of such conjugates are described in Vargeese et al., U.S. Ser. No. 10/201,394 incorporated by reference herein.

[0176] In one embodiment, the invention features a method for generating siNA molecules of the invention with improved bioavailability, comprising (a) introducing a conjugate into the structure of an siNA molecule, and (b) assaying the siNA molecule of step (a) under conditions suitable for isolating siNA molecules having improved bioavailability. Such conjugates can include ligands for cellular receptors, such as peptides derived from naturally occurring protein ligands; protein localization sequences, including cellular ZIP code sequences; antibodies; nucleic acid aptamers; vitamins and other co-factors, such as folate and N-acetylgalactosamine; polymers, such as polyethyleneglycol (PEG); phospholipids; cholesterol; polyamines, such as spermine or spermidine; and others.

[0177] In one embodiment, the invention features a double-stranded short interfering nucleic acid (siNA) molecule that comprises a first nucleotide sequence complementary to a target RNA sequence or a portion thereof, and a second sequence having complementarity to said first sequence, wherein said second sequence is chemically modified in a manner that it can no longer act as a guide sequence for efficiently mediating RNA interference and/or be recognized by cellular proteins that facilitate RNAi.

[0178] In one embodiment, the invention features a double-stranded short interfering nucleic acid (siNA) molecule that comprises a first nucleotide sequence complementary to a target RNA sequence or a portion thereof, and a second sequence having complementarity to said first sequence, wherein the second sequence is designed or modified in a manner that prevents its entry into the RNAi pathway as a guide sequence or as a sequence that is complementary to a target nucleic acid (e.g., RNA) sequence. Such design or modifications are expected to enhance the activity of siNA and/or improve the specificity of siNA molecules of the invention. These modifications are also expected to minimize any off-target effects and/or associated toxicity.

[0179] In one embodiment, the invention features a double-stranded short interfering nucleic acid (siNA) molecule that comprises a first nucleotide sequence complementary to a target RNA sequence or a portion thereof, and a second sequence having complementarity to said first sequence, wherein said second sequence is incapable of acting as a guide sequence for mediating RNA interference.

[0180] In one embodiment, the invention features a double-stranded short interfering nucleic acid (siNA) molecule that comprises a first nucleotide sequence complementary to a target RNA sequence or a portion thereof, and a second sequence having complementarity to said first sequence, wherein said second sequence does not have a terminal 5′-hydroxyl (5′-OH) or 5′-phosphate group.

[0181] In one embodiment, the invention features a double-stranded short interfering nucleic acid (siNA) molecule that comprises a first nucleotide sequence complementary to a target RNA sequence or a portion thereof, and a second sequence having complementarity to said first sequence, wherein said second sequence comprises a terminal cap moiety at the 5′-end of said second sequence. In one embodiment, the terminal cap moiety comprises an inverted abasic, inverted deoxy abasic, inverted nucleotide moiety, a group shown in FIG. 10, an alkyl or cycloalkyl group, a heterocycle, or any other group that prevents RNAi activity in which the second sequence serves as a guide sequence or template for RNAi.

[0182] In one embodiment, the invention features a double-stranded short interfering nucleic acid (siNA) molecule that comprises a first nucleotide sequence complementary to a target RNA sequence or a portion thereof, and a second sequence having complementarity to said first sequence, wherein said second sequence comprises a terminal cap moiety at the 5′-end and 3′-end of said second sequence. In one embodiment, each terminal cap moiety individually comprises an inverted abasic, inverted deoxy abasic, inverted nucleotide moiety, a group shown in FIG. 10, an alkyl or cycloalkyl group, a heterocycle, or any other group that prevents RNAi activity in which the second sequence serves as a guide sequence or template for RNAi.

[0183] In one embodiment, the invention features a method for generating siNA molecules of the invention with improved specificity for down regulating or inhibiting the expression of a target nucleic acid (e.g., a DNA or RNA such as a gene or its corresponding RNA), comprising (a) introducing one or more chemical modifications into the structure of an siNA molecule, and (b) assaying the siNA molecule of step (a) under conditions suitable for isolating siNA molecules having improved specificity. In another embodiment, the chemical modification used to improve specificity comprises terminal cap modifications at the 5′-end, 3′-end, or both 5′ and 3′-ends of the siNA molecule. The terminal cap modifications can comprise, for example, structures shown in FIG. 10 (e.g. inverted deoxyabasic moieties) or any other chemical modification that renders a portion of the siNA molecule (e.g. the sense strand) incapable of mediating RNA interference against an off target nucleic acid sequence. In a non-limiting example, an siNA molecule is designed such that only the antisense sequence of the siNA molecule can serve as a guide sequence for RISC mediated degradation of a corresponding target RNA sequence. This can be accomplished by rendering the sense sequence of the siNA inactive by introducing chemical modifications to the sense strand that preclude recognition of the sense strand as a guide sequence by RNAi machinery. In one embodiment, such chemical modifications comprise any chemical group at the 5′-end of the sense strand of the siNA, or any other group that serves to render the sense strand inactive as a guide sequence for mediating RNA interference. These modifications, for example, can result in a molecule where the 5′-end of the sense strand no longer has a free 5′-hydroxyl (5′-OH) or a free 5′-phosphate group (e.g., phosphate, diphosphate, triphosphate, cyclic phosphate etc.). Non-limiting examples of such siNA constructs are described herein, such as “Stab 9/10”, “Stab 7/8”, “Stab 7/19” and “Stab 17/22” chemistries and variants thereof (see Table IV) wherein the 5′-end and 3′-end of the sense strand of the siNA do not comprise a hydroxyl group or phosphate group.

[0184] In one embodiment, the invention features a method for generating siNA molecules of the invention with improved specificity for down regulating or inhibiting the expression of a target nucleic acid (e.g., a DNA or RNA such as a gene or its corresponding RNA), comprising introducing one or more chemical modifications into the structure of an siNA molecule that prevent a strand or portion of the siNA molecule from acting as a template or guide sequence for RNAi activity. In one embodiment, the inactive strand or sense region of the siNA molecule is the sense strand or sense region of the siNA molecule, i.e. the strand or region of the siNA that does not have complementarity to the target nucleic acid sequence. In one embodiment, such chemical modifications comprise any chemical group at the 5′-end of the sense strand or region of the siNA that does not comprise a 5′-hydroxyl (5′-OH) or 5′-phosphate group, or any other group that serves to render the sense strand or sense region inactive as a guide sequence for mediating RNA interference. Non-limiting examples of such siNA constructs are described herein, such as “Stab 9/10”, “Stab 7/8”, “Stab 7/19” and “Stab 17/22” chemistries and variants thereof (see Table IV) wherein the 5′-end and 3′-end of the sense strand of the siNA do not comprise a hydroxyl group or phosphate group.

[0185] In one embodiment, the invention features a method for screening siNA molecules that are active in mediating RNA interference against a target nucleic acid sequence comprising (a) generating a plurality of unmodified siNA molecules, (b) screening the siNA molecules of step (a) under conditions suitable for isolating siNA molecules that are active in mediating RNA interference against the target nucleic acid sequence, and (c) introducing chemical modifications (e.g. chemical modifications as described herein or as otherwise known in the art) into the active siNA molecules of (b). In one embodiment, the method further comprises re-screening the chemically modified siNA molecules of step (c) under conditions suitable for isolating chemically modified siNA molecules that are active in mediating RNA interference against the target nucleic acid sequence.

[0186] In one embodiment, the invention features a method for screening chemically modified siNA molecules that are active in mediating RNA interference against a target nucleic acid sequence comprising (a) generating a plurality of chemically modified siNA molecules (e.g. siNA molecules as described herein or as otherwise known in the art), and (b) screening the siNA molecules of step (a) under conditions suitable for isolating chemically modified siNA molecules that are active in mediating RNA interference against the target nucleic acid sequence.

[0187] The term “ligand” refers to any compound or molecule, such as a drug, peptide, hormone, or neurotransmitter, that is capable of interacting with another compound, such as a receptor, either directly or indirectly. The receptor that interacts with a ligand can be present on the surface of a cell or can alternately be an intercellular receptor. Interaction of the ligand with the receptor can result in a biochemical reaction, or can simply be a physical interaction or association.

[0188] In another embodiment, the invention features a method for generating siNA molecules of the invention with improved bioavailability comprising (a) introducing an excipient formulation to an siNA molecule, and (b) assaying the siNA molecule of step (a) under conditions suitable for isolating siNA molecules having improved bioavailability. Such excipients include polymers such as cyclodextrins, lipids, cationic lipids, polyamines, phospholipids, nanoparticles, receptors, ligands, and others.

[0189] In another embodiment, the invention features a method for generating siNA molecules of the invention with improved bioavailability comprising (a) introducing nucleotides having any of Formulae I-VII or any combination thereof into an siNA molecule, and (b) assaying the siNA molecule of step (a) under conditions suitable for isolating siNA molecules having improved bioavailability.

[0190] In another embodiment, polyethylene glycol (PEG) can be covalently attached to siNA compounds of the present invention. The attached PEG can be any molecular weight, preferably from about 2,000 to about 50,000 daltons (Da).

[0191] The present invention can be used alone or as a component of a kit having at least one of the reagents necessary to carry out the in vitro or in vivo introduction of RNA to test samples and/or subjects. For example, preferred components of the kit include an siNA molecule of the invention and a vehicle that promotes introduction of the siNA into cells of interest as described herein (e.g., using lipids and other methods of transfection known in the art, see for example Beigelman et al, U.S. Pat. No. 6,395,713). The kit can be used for target validation, such as in determining gene function and/or activity, or in drug optimization, and in drug discovery (see for example Usman et al., U.S. Ser. No. 60/402,996). Such a kit can also include instructions to allow a user of the kit to practice the invention.

[0192] The term “short interfering nucleic acid”, “siNA”, “short interfering RNA”, “siRNA”, “short interfering nucleic acid molecule”, “short interfering oligonucleotide molecule”, or “chemically modified short interfering nucleic acid molecule” as used herein refers to any nucleic acid molecule capable of inhibiting or down regulating gene expression or viral replication, for example by mediating RNA interference “RNAi” or gene silencing in a sequence-specific manner; see for example Zamore et al., 2000, Cell, 101, 25-33; Bass, 2001, Nature, 411, 428-429; Elbashir et al., 2001, Nature, 411, 494-498; and Kreutzer et al., International PCT Publication No. WO 00/44895; Zernicka-Goetz et al., International PCT Publication No. WO 01/36646; Fire, International PCT Publication No. WO 99/32619; Plaetinck et al., International PCT Publication No. WO 00/01846; Mello and Fire, International PCT Publication No. WO 01/29058; Deschamps-Depaillette, International PCT Publication No. WO 99/07409; and Li et al., International PCT Publication No. WO 00/44914; Allshire, 2002, Science, 297, 1818-1819; Volpe et al., 2002, Science, 297, 1833-1837; Jenuwein, 2002, Science, 297, 2215-2218; and Hall et al., 2002, Science, 297, 2232-2237; Hutvagner and Zamore, 2002, Science, 297, 2056-60; McManus et al., 2002, RNA, 8, 842-850; Reinhart et al., 2002, Gene & Dev., 16, 1616-1626; and Reinhart & Bartel, 2002, Science, 297, 1831). Non limiting examples of siNA molecules of the invention are shown in FIGS. 4-6, and Tables II and III herein. For example the siNA can be a double-stranded polynucleotide molecule comprising self-complementary sense and antisense regions, wherein the antisense region comprises nucleotide sequence that is complementary to nucleotide sequence in a target nucleic acid molecule or a portion thereof and the sense region having nucleotide sequence corresponding to the target nucleic acid sequence or a portion thereof. The siNA can be assembled from two separate oligonucleotides, where one strand is the sense strand and the other is the antisense strand, wherein the antisense and sense strands are self-complementary (i.e. each strand comprises nucleotide sequence that is complementary to nucleotide sequence in the other strand; such as where the antisense strand and sense strand form a duplex or double-stranded structure, for example wherein the double-stranded region is about 19 base pairs); the antisense strand comprises nucleotide sequence that is complementary to nucleotide sequence in a target nucleic acid molecule or a portion thereof and the sense strand comprises nucleotide sequence corresponding to the target nucleic acid sequence or a portion thereof. Alternatively, the siNA is assembled from a single oligonucleotide, where the self-complementary sense and antisense regions of the siNA are linked by means of a nucleic acid based or non-nucleic acid-based linker(s). The siNA can be a polynucleotide with a duplex, asymmetric duplex, hairpin or asymmetric hairpin secondary structure, having self-complementary sense and antisense regions, wherein the antisense region comprises nucleotide sequence that is complementary to nucleotide sequence in a separate target nucleic acid molecule or a portion thereof and the sense region having nucleotide sequence corresponding to the target nucleic acid sequence or a portion thereof. The siNA can be a circular single-stranded polynucleotide having two or more loop structures and a stem comprising self-complementary sense and antisense regions, wherein the antisense region comprises nucleotide sequence that is complementary to nucleotide sequence in a target nucleic acid molecule or a portion thereof and the sense region having nucleotide sequence corresponding to the target nucleic acid sequence or a portion thereof, and wherein the circular polynucleotide can be processed either in vivo or in vitro to generate an active siNA molecule capable of mediating RNAi. The siNA can also comprise a single-stranded polynucleotide having nucleotide sequence complementary to nucleotide sequence in a target nucleic acid molecule or a portion thereof (for example, where such siNA molecule does not require the presence within the siNA molecule of nucleotide sequence corresponding to the target nucleic acid sequence or a portion thereof), wherein the single-stranded polynucleotide can further comprise a terminal phosphate group, such as a 5′-phosphate (see for example Martinez et al., 2002, Cell., 110, 563-574 and Schwarz et al., 2002, Molecular Cell, 10, 537-568), or 5′,3′-diphosphate. In certain embodiments, the siNA molecule of the invention comprises separate sense and antisense sequences or regions, wherein the sense and antisense regions are covalently linked by nucleotide or non-nucleotide linkers molecules as is known in the art, or are alternately non-covalently linked by ionic interactions, hydrogen bonding, van der waals interactions, hydrophobic interactions, and/or stacking interactions. In certain embodiments, the siNA molecules of the invention comprise nucleotide sequence that is complementary to nucleotide sequence of a target gene. In another embodiment, the siNA molecule of the invention interacts with nucleotide sequence of a target gene in a manner that causes inhibition of expression of the target gene. As used herein, siNA molecules need not be limited to those molecules containing only RNA, but further encompasses chemically modified nucleotides and non-nucleotides. In certain embodiments, the short interfering nucleic acid molecules of the invention lack 2′-hydroxy (2′-OH) containing nucleotides. Applicant describes in certain embodiments short interfering nucleic acids that do not require the presence of nucleotides having a 2′-hydroxy group for mediating RNAi and as such, short interfering nucleic acid molecules of the invention optionally do not include any ribonucleotides (e.g., nucleotides having a 2′-OH group). Such siNA molecules that do not require the presence of ribonucleotides within the siNA molecule to support RNAi can however have an attached linker or linkers or other attached or associated groups, moieties, or chains containing one or more nucleotides with 2′-OH groups. Optionally, siNA molecules can comprise ribonucleotides at about 5, 10, 20, 30, 40, or 50% of the nucleotide positions. The modified short interfering nucleic acid molecules of the invention can also be referred to as short interfering modified oligonucleotides “siMON.” As used herein, the term siNA is meant to be equivalent to other terms used to describe nucleic acid molecules that are capable of mediating sequence specific RNAi, for example short interfering RNA (siRNA), double-stranded RNA (dsRNA), micro-RNA (miRNA), short hairpin RNA (shRNA), short interfering oligonucleotide, short interfering nucleic acid, short interfering modified oligonucleotide, chemically modified siRNA, post-transcriptional gene silencing RNA (ptgsRNA), and others. In addition, as used herein, the term RNAi is meant to be equivalent to other terms used to describe sequence specific RNA interference, such as post transcriptional gene silencing, translational inhibition, or epigenetics. For example, siNA molecules of the invention can be used to epigenetically silence genes at both the post-transcriptional level or the pre-transcriptional level. In a non-limiting example, epigenetic regulation of gene expression by siNA molecules of the invention can result from siNA mediated modification of chromatin structure to alter gene expression (see, for example, Verdel et al., 2004, Science, 303, 672-676; Pal-Bhadra et al., 2004, Science, 303, 669-672; Allshire, 2002, Science, 297, 1818-1819; Volpe et al., 2002, Science, 297, 1833-1837; Jenuwein, 2002, Science, 297, 2215-2218; and Hall et al., 2002, Science, 297, 2232-2237).

[0193] In one embodiment, an siNA molecule of the invention is a duplex forming oligonucleotide “DFO”, (see for example FIGS. 14-15 and Vaish et al., U.S. Ser. No. 10/727,780 filed Dec. 3, 2003).

[0194] In one embodiment, an siNA molecule of the invention is a multifunctional siNA, (see for example FIGS. 16-22 and Jadhav et al., U.S. Ser. No. 60/543,480, filed Feb. 10, 2004). The multifunctional siNA of the invention can comprise sequence targeting, for example, two regions of SARS RNA (see for example target sequences in Tables II and III) or alternately, SARS RNA and cellular RNA involved in SARS virus infection or replication. In another embodiment, a multifunctional siNA of the invention can comprise sequence targeting for example both viral genes encoding RNAi inhibitory factors and viral genes encoding viral structural proteins.

[0195] By “asymmetric hairpin” as used herein is meant a linear siNA molecule comprising an antisense region, a loop portion that can comprise nucleotides or non-nucleotides, and a sense region that comprises fewer nucleotides than the antisense region to the extent that the sense region has enough complementary nucleotides to base pair with the antisense region and form a duplex with loop. For example, an asymmetric hairpin siNA molecule of the invention can comprise an antisense region having length sufficient to mediate RNAi in a cell or in vitro system (e.g. about 19 to about 22 (e.g., about 19, 20, 21, or 22) nucleotides) and a loop region comprising about 4 to about 8 (e.g., about 4, 5, 6, 7, or 8) nucleotides, and a sense region having about 3 to about 18 (e.g., about 3, 4, 5, 6, 7, 8, 9, 10, 11, 12, 13, 14, 15, 16, 17, or 18) nucleotides that are complementary to the antisense region. The asymmetric hairpin siNA molecule can also comprise a 5′-terminal phosphate group that can be chemically modified. The loop portion of the asymmetric hairpin siNA molecule can comprise nucleotides, non-nucleotides, linker molecules, or conjugate molecules as described herein.

[0196] By “asymmetric duplex” as used herein is meant an siNA molecule having two separate strands comprising a sense region and an antisense region, wherein the sense region comprises fewer nucleotides than the antisense region to the extent that the sense region has enough complementary nucleotides to base pair with the antisense region and form a duplex. For example, an asymmetric duplex siNA molecule of the invention can comprise an antisense region having length sufficient to mediate RNAi in a cell or in vitro system (e.g. about 19 to about 22 (e.g. about 19, 20, 21, or 22) nucleotides) and a sense region having about 3 to about 18 (e.g., about 3, 4, 5, 6, 7, 8, 9, 10, 11, 12, 13, 14, 15, 16, 17, or 18) nucleotides that are complementary to the antisense region.

[0197] By “modulate” is meant that the expression of the gene, or level of RNA molecule or equivalent RNA molecules encoding one or more proteins or protein subunits, or activity of one or more proteins or protein subunits is up regulated or down regulated, such that expression, level, or activity is greater than or less than that observed in the absence of the modulator. For example, the term “modulate” can mean “inhibit,” but the use of the word “modulate” is not limited to this definition.

[0198] By “inhibit”, “down-regulate”, or “reduce”, it is meant that the expression of the gene, or level of RNA molecules or equivalent RNA molecules encoding one or more proteins or protein subunits, or activity of one or more proteins or protein subunits, is reduced below that observed in the absence of the nucleic acid molecules (e.g., siNA) of the invention. In one embodiment, inhibition, down-regulation or reduction with an siNA molecule is below that level observed in the presence of an inactive or attenuated molecule. In another embodiment, inhibition, down-regulation, or reduction with siNA molecules is below that level observed in the presence of, for example, an siNA molecule with scrambled sequence or with mismatches. In another embodiment, inhibition, down-regulation, or reduction of gene expression with a nucleic acid molecule of the instant invention is greater in the presence of the nucleic acid molecule than in its absence.

[0199] By “gene”, or “target gene”, is meant, a nucleic acid that encodes an RNA, for example, nucleic acid sequences including, but not limited to, structural genes encoding a polypeptide. A gene or target gene can also encode a functional RNA (fRNA) or non-coding RNA (ncRNA), such as small temporal RNA (stRNA), micro RNA (miRNA), small nuclear RNA (snRNA), short interfering RNA (siRNA), small nucleolar RNA (snRNA), ribosomal RNA (rRNA), transfer RNA (tRNA) and precursor RNAs thereof. Such non-coding RNAs can serve as target nucleic acid molecules for siNA mediated RNA interference in modulating the activity of fRNA or ncRNA involved in functional or regulatory cellular processes. Aberrant fRNA or ncRNA activity leading to disease can therefore be modulated by siNA molecules of the invention. siNA molecules targeting FNA and ncRNA can also be used to manipulate or alter the genotype or phenotype of an organism or cell, by intervening in cellular processes such as genetic imprinting, transcription, translation, or nucleic acid processing (e.g., transamination, methylation etc.). The target gene can be a gene derived from a cell, an endogenous gene, a transgene, or exogenous genes such as genes of a pathogen, for example a virus, which is present in the cell after infection thereof. The cell containing the target gene can be derived from or contained in any organism, for example a plant, animal, protozoan, virus, bacterium, or fungus. Non-limiting examples of plants include monocots, dicots, or gymnosperms. Non-limiting examples of animals include vertebrates or invertebrates. Non-limiting examples of fungi include molds or yeasts.

[0200] By “SARS” or “SARS virus” as used herein is meant the SARS virus or any protein, peptide, or polypeptide, having SARS virus activity or encoded by the SARS genome. The term “SARS” also includes nucleic acid molecules encoding RNA or protein(s) associated with the development and/or maintenance of SARS virus infection, such as nucleic acid molecules which encode SARS RNA or polypeptides (such as polynucleotides having Genbank Accession numbers shown in Table I), including polypeptides of different strains of SARS, mutant SARS genes, and splice variants of SARS genes, as well as genes involved in SARS pathways of gene expression and/or SARS activity. Also, the term “SARS” is meant to encompass SARS viral gene products and genes that modulate cellular targets for SARS virus infection, such as those described herein.

[0201] By “SARS protein” or “SARS virus protein” is meant, protein, peptide, or polypeptide, having SARS virus activity or encoded by the SARS genome or alternately, cellular proteins involved in SARS virus infection and/or replication.

[0202] By “homologous sequence” is meant, a nucleotide sequence that is shared by one or more polynucleotide sequences, such as genes, gene transcripts and/or non-coding polynucleotides. For example, a homologous sequence can be a nucleotide sequence that is shared by two or more genes encoding related but different proteins, such as different members of a gene family, different protein epitopes, different protein isoforms or completely divergent genes, such as a cytokine and its corresponding receptors. A homologous sequence can be a nucleotide sequence that is shared by two or more non-coding polynucleotides, such as noncoding DNA or RNA, regulatory sequences, introns, and sites of transcriptional control or regulation. Homologous sequences can also include conserved sequence regions shared by more than one polynucleotide sequence. Homology does not need to be perfect homology (e.g., 100%), as partially homologous sequences are also contemplated by the instant invention (e.g., 99%, 98%, 97%, 96%, 95%, 94%, 93%, 92%, 91%, 90%, 89%, 88%, 87%, 86%, 85%, 84%, 83%, 82%, 81%, 80% etc.).

[0203] By “conserved sequence region” is meant, a nucleotide sequence of one or more regions in a polynucleotide does not vary significantly between generations or from one biological system or organism to another biological system or organism. The polynucleotide can include both coding and non-coding DNA and RNA.

[0204] By “sense region” is meant a nucleotide sequence of an siNA molecule having complementarity to an antisense region of the siNA molecule. In addition, the sense region of an siNA molecule can comprise a nucleic acid sequence having homology with a target nucleic acid sequence.

[0205] By “antisense region” is meant a nucleotide sequence of an siNA molecule having complementarity to a target nucleic acid sequence. In addition, the antisense region of an siNA molecule can optionally comprise a nucleic acid sequence having complementarity to a sense region of the siNA molecule.

[0206] By “target nucleic acid” is meant any nucleic acid sequence whose expression or activity is to be modulated. The target nucleic acid can be DNA or RNA.

[0207] By “complementarity” is meant that a nucleic acid can form hydrogen bond(s) with another nucleic acid sequence by either traditional Watson-Crick or other non-traditional types. In reference to the nucleic molecules of the present invention, the binding free energy for a nucleic acid molecule with its complementary sequence is sufficient to allow the relevant function of the nucleic acid to proceed, e.g., RNAi activity. Determination of binding free energies for nucleic acid molecules is well known in the art (see, e.g., Turner et al., 1987, CSH Symp. Quant. Biol. LII pp. 123-133; Frier et al., 1986, Proc. Nat. Acad. Sci. USA 83:9373-9377; Turner et al., 1987, J. Am. Chem. Soc. 109:3783-3785). A percent complementarity indicates the percentage of contiguous residues in a nucleic acid molecule that can form hydrogen bonds (e.g., Watson-Crick base pairing) with a second nucleic acid sequence (e.g., 5, 6, 7, 8, 9, or 10 nucleotides out of a total of 10 nucleotides in the first oligonucleotide being based paired to a second nucleic acid sequence having 10 nucleotides represents 50%, 60%, 70%, 80%, 90%, and 100% complementary respectively). “Perfectly complementary” means that all the contiguous residues of a nucleic acid sequence will hydrogen bond with the same number of contiguous residues in a second nucleic acid sequence.

[0208] The siNA molecules of the invention represent a novel therapeutic approach to treat various diseases and conditions, including SARS virus infection, acute respiratory failure, viral pneumonia, and any other indications that can respond to the level of SARS in a cell or tissue. The reduction of SARS expression and thus reduction in the level of the respective protein relieves, to some extent, the symptoms of the disease or condition.

[0209] In one embodiment of the present invention, each sequence of an siNA molecule of the invention is independently about 18 to about 24 nucleotides in length, in specific embodiments about 18, 19, 20, 21, 22, 23, or 24 nucleotides in length. In another embodiment, the siNA duplexes of the invention independently comprise about 17 to about 23 base pairs (e.g., about 17, 18, 19, 20, 21, 22 or 23). In yet another embodiment, siNA molecules of the invention comprising hairpin or circular structures are about 35 to about 55 (e.g., about 35, 40, 45, 50 or 55) nucleotides in length, or about 38 to about 44 (e.g., 38, 39, 40, 41, 42, 43 or 44) nucleotides in length and comprising about 16 to about 22 (e.g., about 16, 17, 18, 19, 20, 21 or 22) base pairs. Exemplary siNA molecules of the invention are shown in Table II. Exemplary synthetic siNA molecules of the invention are shown in Table III and/or FIGS. 4-5.

[0210] As used herein “cell” is used in its usual biological sense, and does not refer to an entire multicellular organism, e.g., specifically does not refer to a human. The cell can be present in an organism, e.g., birds, plants and mammals such as humans, cows, sheep, apes, monkeys, swine, dogs, and cats. The cell can be prokaryotic (e.g., bacterial cell) or eukaryotic (e.g., mammalian or plant cell). The cell can be of somatic or germ line origin, totipotent or pluripotent, dividing or non-dividing. The cell can also be derived from or can comprise a gamete or embryo, a stem cell, or a fully differentiated cell.

[0211] The siNA molecules of the invention are added directly, or can be complexed with cationic lipids, packaged within liposomes, or otherwise delivered to target cells or tissues. The nucleic acid or nucleic acid complexes can be locally administered to relevant tissues ex vivo, or in vivo through injection, infusion pump or stent, with or without their incorporation in biopolymers. In particular embodiments, the nucleic acid molecules of the invention comprise sequences shown in Tables II-III and/or FIGS. 4-5. Examples of such nucleic acid molecules consist essentially of sequences defined in these tables and figures. Furthermore, the chemically modified constructs described in Table IV can be applied to any siNA sequence of the invention.

[0212] In another aspect, the invention provides mammalian cells containing one or more siNA molecules of this invention. The one or more siNA molecules can independently be targeted to the same or different sites.

[0213] By “RNA” is meant a molecule comprising at least one ribonucleotide residue. By “ribonucleotide” is meant a nucleotide with a hydroxyl group at the 2′ position of a β-D-ribo-furanose moiety. The terms include double-stranded RNA, single-stranded RNA, isolated RNA such as partially purified RNA, essentially pure RNA, synthetic RNA, recombinantly produced RNA, as well as altered RNA that differs from naturally occurring RNA by the addition, deletion, substitution and/or alteration of one or more nucleotides. Such alterations can include addition of non-nucleotide material, such as to the end(s) of the siNA or internally, for example at one or more nucleotides of the RNA. Nucleotides in the RNA molecules of the instant invention can also comprise non-standard nucleotides, such as non-naturally occurring nucleotides or chemically synthesized nucleotides or deoxynucleotides. These altered RNAs can be referred to as analogs or analogs of naturally-occurring RNA.

[0214] By “subject” is meant an organism, which is a donor or recipient of explanted cells or the cells themselves. “Subject” also refers to an organism to which the nucleic acid molecules of the invention can be administered. A subject can be a mammal or mammalian cells, including a human or human cells.

[0215] The term “phosphorothioate” as used herein refers to an internucleotide linkage having Formula I, wherein Z and/or W comprise a sulfur atom. Hence, the term phosphorothioate refers to both phosphorothioate and phosphorodithioate internucleotide linkages.

[0216] The term “phosphonoacetate” as used herein refers to an internucleotide linkage having Formula I, wherein Z and/or W comprise an acetyl or protected acetyl group.

[0217] The term “thiophosphonoacetate” as used herein refers to an internucleotide linkage having Formula I, wherein Z comprises an acetyl or protected acetyl group and W comprises a sulfur atom or alternately W comprises an acetyl or protected acetyl group and Z comprises a sulfur atom.

[0218] The term “universal base” as used herein refers to nucleotide base analogs that form base pairs with each of the natural DNA/RNA bases with little discrimination between them. Non-limiting examples of universal bases include C-phenyl, C-naphthyl and other aromatic derivatives, inosine, azole carboxamides, and nitroazole derivatives such as 3-nitropyrrole, 4-nitroindole, 5-nitroindole, and 6-nitroindole as known in the art (see for example Loakes, 2001, Nucleic Acids Research, 29, 2437-2447).

[0219] The term “acyclic nucleotide” as used herein refers to any nucleotide having an acyclic ribose sugar.

[0220] The nucleic acid molecules of the instant invention, individually, or in combination or in conjunction with other drugs, can be used to treat diseases or conditions discussed herein (e.g., cancers and other proliferative conditions). For example, to treat a particular disease or condition, the siNA molecules can be administered to a subject or can be administered to other appropriate cells evident to those skilled in the art, individually or in combination with one or more drugs under conditions suitable for the treatment.

[0221] In a further embodiment, the siNA molecules can be used in combination with other known treatments to treat conditions or diseases discussed above. For example, the described molecules could be used in combination with one or more known therapeutic agents to treat a disease or condition. Non-limiting examples of other therapeutic agents that can be readily combined with an siNA molecule of the invention are enzymatic nucleic acid molecules, allosteric nucleic acid molecules, antisense, decoy, or aptamer nucleic acid molecules, antibodies such as monoclonal antibodies, small molecules, and other organic and/or inorganic compounds including metals, salts and ions.

[0222] In one embodiment, the invention features an expression vector comprising a nucleic acid sequence encoding at least one siNA molecule of the invention, in a manner which allows expression of the siNA molecule. For example, the vector can contain sequence(s) encoding both strands of an siNA molecule comprising a duplex. The vector can also contain sequence(s) encoding a single nucleic acid molecule that is self-complementary and thus forms an siNA molecule. Non-limiting examples of such expression vectors are described in Paul et al., 2002, Nature Biotechnology, 19, 505; Miyagishi and Taira, 2002, Nature Biotechnology, 19, 497; Lee et al., 2002, Nature Biotechnology, 19, 500; and Novina et al., 2002, Nature Medicine, advance online publication doi: 10.1038/nm725.

[0223] In another embodiment, the invention features a mammalian cell, for example, a human cell, including an expression vector of the invention.

[0224] In yet another embodiment, the expression vector of the invention comprises a sequence for an siNA molecule having complementarity to a RNA molecule referred to by a Genbank Accession numbers, for example Genbank Accession Nos. shown in Table I.

[0225] In one embodiment, an expression vector of the invention comprises a nucleic acid sequence encoding two or more siNA molecules, which can be the same or different.

[0226] In another aspect of the invention, siNA molecules that interact with target RNA molecules and down-regulate gene encoding target RNA molecules (for example target RNA molecules referred to by Genbank Accession numbers herein) are expressed from transcription units inserted into DNA or RNA vectors. The recombinant vectors can be DNA plasmids or viral vectors. siNA expressing viral vectors can be constructed based on, but not limited to, adeno-associated virus, retrovirus, adenovirus, or alphavirus. The recombinant vectors capable of expressing the siNA molecules can be delivered as described herein, and persist in target cells. Alternatively, viral vectors can be used that provide for transient expression of siNA molecules. Such vectors can be repeatedly administered as necessary. Once expressed, the siNA molecules bind and down-regulate gene function or expression via RNA interference (RNAi). Delivery of siNA expressing vectors can be systemic, such as by intravenous or intramuscular administration, by administration to target cells ex-planted from a subject followed by reintroduction into the subject, or by any other means that would allow for introduction into the desired target cell.

[0227] By “vectors” is meant any nucleic acid- and/or viral-based technique used to deliver a desired nucleic acid.

[0228] Other features and advantages of the invention will be apparent from the following description of the preferred embodiments thereof, and from the claims.

### BRIEF DESCRIPTION OF THE DRAWINGS

[0229] FIG. 1 shows a non-limiting example of a scheme for the synthesis of siNA molecules. The complementary siNA sequence strands, strand 1 and strand 2, are synthesized in tandem and are connected by a cleavable linkage, such as a nucleotide succinate or abasic succinate, which can be the same or different from the cleavable linker used for solid phase synthesis on a solid support. The synthesis can be either solid phase or solution phase, in the example shown, the synthesis is a solid phase synthesis. The synthesis is performed such that a protecting group, such as a dimethoxytrityl group, remains intact on the terminal nucleotide of the tandem oligonucleotide. Upon cleavage and deprotection of the oligonucleotide, the two siNA strands spontaneously hybridize to form an siNA duplex, which allows the purification of the duplex by utilizing the properties of the terminal protecting group, for example by applying a trityl on purification method wherein only duplexes/oligonucleotides with the terminal protecting group are isolated.

[0230] FIG. 2 shows a MALDI-TOF mass spectrum of a purified siNA duplex synthesized by a method of the invention. The two peaks shown correspond to the predicted mass of the separate siNA sequence strands. This result demonstrates that the siNA duplex generated from tandem synthesis can be purified as a single entity using a simple trityl-on purification methodology.

[0231] FIG. 3 shows a non-limiting proposed mechanistic representation of target RNA degradation involved in RNAi. Double-stranded RNA (dsRNA), which is generated by RNA-dependent RNA polymerase (RdRP) from foreign single-stranded RNA, for example viral, transposon, or other exogenous RNA, activates the DICER enzyme that in turn generates siNA duplexes. Alternately, synthetic or expressed siNA can be introduced directly into a cell by appropriate means. An active siNA complex forms which recognizes a target RNA, resulting in degradation of the target RNA by the RISC endonuclease complex or in the synthesis of additional RNA by RNA-dependent RNA polymerase (RdRP), which can activate DICER and result in additional siNA molecules, thereby amplifying the RNAi response.

[0232] FIG. 4A-F shows non-limiting examples of chemically modified siNA constructs of the present invention. In the figure, N stands for any nucleotide (adenosine, guanosine, cytosine, uridine, or optionally thymidine, for example thymidine can be substituted in the overhanging regions designated by parenthesis (N N). Various modifications are shown for the sense and antisense strands of the siNA constructs.

[0233] FIG. 4A: The sense strand comprises 21 nucleotides wherein the two terminal 3′-nucleotides are optionally base paired and wherein all nucleotides present are ribonucleotides except for (N N) nucleotides, which can comprise ribonucleotides, deoxynucleotides, universal bases, or other chemical modifications described herein. The antisense strand comprises 21 nucleotides, optionally having a 3′-terminal glyceryl moiety wherein the two terminal 3′-nucleotides are optionally complementary to the target RNA sequence, and wherein all nucleotides present are ribonucleotides except for (N N) nucleotides, which can comprise ribonucleotides, deoxynucleotides, universal bases, or other chemical modifications described herein. A modified internucleotide linkage, such as a phosphorothioate, phosphorodithioate or other modified internucleotide linkage as described herein, shown as “s”, optionally connects the (N N) nucleotides in the antisense strand. The antisense strand of constructs A-F comprise sequence complementary to any target nucleic acid sequence of the invention. Furthermore, when a glyceryl moiety (L) is present at the 3′-end of the antisense strand for any construct shown in FIG. 4 A-F, the modified internucleotide linkage is optional.

[0234] FIG. 4B: The sense strand comprises 21 nucleotides wherein the two terminal 3′-nucleotides are optionally base paired and wherein all pyrimidine nucleotides that may be present are 2′-deoxy-2′-fluoro modified nucleotides and all purine nucleotides that may be present are 2′-O-methyl modified nucleotides except for (N N) nucleotides, which can comprise ribonucleotides, deoxynucleotides, universal bases, or other chemical modifications described herein. The antisense strand comprises 21 nucleotides, optionally having a 3′-terminal glyceryl moiety and wherein the two terminal 3′-nucleotides are optionally complementary to the target RNA sequence, and wherein all pyrimidine nucleotides that may be present are 2′-deoxy-2′-fluoro modified nucleotides and all purine nucleotides that may be present are 2′-O-methyl modified nucleotides except for (N N) nucleotides, which can comprise ribonucleotides, deoxynucleotides, universal bases, or other chemical modifications described herein. A modified internucleotide linkage, such as a phosphorothioate, phosphorodithioate or other modified internucleotide linkage as described herein, shown as “s”, optionally connects the (N N) nucleotides in the sense and antisense strand.

[0235] FIG. 4C: The sense strand comprises 21 nucleotides having 5′- and 3′-terminal cap moieties wherein the two terminal 3′-nucleotides are optionally base paired and wherein all pyrimidine nucleotides that may be present are 2′-O-methyl or 2′-deoxy-2′-fluoro modified nucleotides except for (N N) nucleotides, which can comprise ribonucleotides, deoxynucleotides, universal bases, or other chemical modifications described herein. The antisense strand comprises 21 nucleotides, optionally having a 3′-terminal glyceryl moiety and wherein the two terminal 3′-nucleotides are optionally complementary to the target RNA sequence, and wherein all pyrimidine nucleotides that may be present are 2′-deoxy-2′-fluoro modified nucleotides except for (N N) nucleotides, which can comprise ribonucleotides, deoxynucleotides, universal bases, or other chemical modifications described herein. A modified internucleotide linkage, such as a phosphorothioate, phosphorodithioate or other modified internucleotide linkage as described herein, shown as “s”, optionally connects the (N N) nucleotides in the antisense strand.

[0236] FIG. 4D: The sense strand comprises 21 nucleotides having 5′- and 3′-terminal cap moieties wherein the two terminal 3′-nucleotides are optionally base paired and wherein all pyrimidine nucleotides that may be present are 2′-deoxy-2′-fluoro modified nucleotides except for (N N) nucleotides, which can comprise ribonucleotides, deoxynucleotides, universal bases, or other chemical modifications described herein and wherein and all purine nucleotides that may be present are 2′-deoxy nucleotides. The antisense strand comprises 21 nucleotides, optionally having a 3′-terminal glyceryl moiety and wherein the two terminal 3′-nucleotides are optionally complementary to the target RNA sequence, wherein all pyrimidine nucleotides that may be present are 2′-deoxy-2′-fluoro modified nucleotides and all purine nucleotides that may be present are 2′-O-methyl modified nucleotides except for (N N) nucleotides, which can comprise ribonucleotides, deoxynucleotides, universal bases, or other chemical modifications described herein. A modified internucleotide linkage, such as a phosphorothioate, phosphorodithioate or other modified internucleotide linkage as described herein, shown as “s”, optionally connects the (N N) nucleotides in the antisense strand.

[0237] FIG. 4E: The sense strand comprises 21 nucleotides having 5′- and 3′-terminal cap moieties wherein the two terminal 3′-nucleotides are optionally base paired and wherein all pyrimidine nucleotides that may be present are 2′-deoxy-2′-fluoro modified nucleotides except for (N N) nucleotides, which can comprise ribonucleotides, deoxynucleotides, universal bases, or other chemical modifications described herein. The antisense strand comprises 21 nucleotides, optionally having a 3′-terminal glyceryl moiety and wherein the two terminal 3′-nucleotides are optionally complementary to the target RNA sequence, and wherein all pyrimidine nucleotides that may be present are 2′-deoxy-2′-fluoro modified nucleotides and all purine nucleotides that may be present are 2′-O-methyl modified nucleotides except for (N N) nucleotides, which can comprise ribonucleotides, deoxynucleotides, universal bases, or other chemical modifications described herein. A modified internucleotide linkage, such as a phosphorothioate, phosphorodithioate or other modified internucleotide linkage as described herein, shown as “s”, optionally connects the (N N) nucleotides in the antisense strand.

[0238] FIG. 4F: The sense strand comprises 21 nucleotides having 5′- and 3′-terminal cap moieties wherein the two terminal 3′-nucleotides are optionally base paired and wherein all pyrimidine nucleotides that may be present are 2′-deoxy-2′-fluoro modified nucleotides except for (N N) nucleotides, which can comprise ribonucleotides, deoxynucleotides, universal bases, or other chemical modifications described herein and wherein and all purine nucleotides that may be present are 2′-deoxy nucleotides. The antisense strand comprises 21 nucleotides, optionally having a 3′-terminal glyceryl moiety and wherein the two terminal 3′-nucleotides are optionally complementary to the target RNA sequence, and having one 3′-terminal phosphorothioate internucleotide linkage and wherein all pyrimidine nucleotides that may be present are 2′-deoxy-2′-fluoro modified nucleotides and all purine nucleotides that may be present are 2′-deoxy nucleotides except for (N N) nucleotides, which can comprise ribonucleotides, deoxynucleotides, universal bases, or other chemical modifications described herein. A modified internucleotide linkage, such as a phosphorothioate, phosphorodithioate or other modified internucleotide linkage as described herein, shown as “s”, optionally connects the (N N) nucleotides in the antisense strand.

[0239] FIG. 5A-F shows non-limiting examples of specific chemically modified siNA sequences of the invention. A-F applies the chemical modifications described in FIG. 4A-F to a SARS virus siNA sequence. Such chemical modifications can be applied to any SARS sequence and/or SARS polymorphism sequence.

[0240] FIG. 6 shows non-limiting examples of different siNA constructs of the invention. The examples shown (constructs 1, 2, and 3) have 19 representative base pairs; however, different embodiments of the invention include any number of base pairs described herein. Bracketed regions represent nucleotide overhangs, for example comprising about 1, 2, 3, or 4 nucleotides in length, preferably about 2 nucleotides. Constructs 1 and 2 can be used independently for RNAi activity. Construct 2 can comprise a polynucleotide or non-nucleotide linker, which can optionally be designed as a biodegradable linker. In one embodiment, the loop structure shown in construct 2 can comprise a biodegradable linker that results in the formation of construct 1 in vivo and/or in vitro. In another example, construct 3 can be used to generate construct 2 under the same principle wherein a linker is used to generate the active siNA construct 2 in vivo and/or in vitro, which can optionally utilize another biodegradable linker to generate the active siNA construct 1 in vivo and/or in vitro. As such, the stability and/or activity of the siNA constructs can be modulated based on the design of the siNA construct for use in vivo or in vitro and/or in vitro.

[0241] FIG. 7A-C is a diagrammatic representation of a scheme utilized in generating an expression cassette to generate siNA hairpin constructs.

[0242] FIG. 7A: A DNA oligomer is synthesized with a 5′-restriction site (R1) sequence followed by a region having sequence identical (sense region of siNA) to a predetermined SARS target sequence, wherein the sense region comprises, for example, about 19, 20, 21, or 22 nucleotides (N) in length, which is followed by a loop sequence of defined sequence (X), comprising, for example, about 3 to about 10 nucleotides.

[0243] FIG. 7B: The synthetic construct is then extended by DNA polymerase to generate a hairpin structure having self-complementary sequence that will result in an siNA transcript having specificity for a SARS target sequence and having self-complementary sense and antisense regions.

[0244] FIG. 7C: The construct is heated (for example to about 95° C.) to linearize the sequence, thus allowing extension of a complementary second DNA strand using a primer to the 3′-restriction sequence of the first strand. The double-stranded DNA is then inserted into an appropriate vector for expression in cells. The construct can be designed such that a 3′-terminal nucleotide overhang results from the transcription, for example by engineering restriction sites and/or utilizing a poly-U termination region as described in Paul et al., 2002, Nature Biotechnology, 29, 505-508.

[0245] FIG. 8A-C is a diagrammatic representation of a scheme utilized in generating an expression cassette to generate double-stranded siNA constructs.

[0246] FIG. 8A: A DNA oligomer is synthesized with a 5′-restriction (R1) site sequence followed by a region having sequence identical (sense region of siNA) to a predetermined SARS target sequence, wherein the sense region comprises, for example, about 19, 20, 21, or 22 nucleotides (N) in length, and which is followed by a 3′-restriction site (R2) which is adjacent to a loop sequence of defined sequence (X).

[0247] FIG. 8B: The synthetic construct is then extended by DNA polymerase to generate a hairpin structure having self-complementary sequence.

[0248] FIG. 8C: The construct is processed by restriction enzymes specific to R1 and R2 to generate a double-stranded DNA which is then inserted into an appropriate vector for expression in cells. The transcription cassette is designed such that a U6 promoter region flanks each side of the dsDNA which generates the separate sense and antisense strands of the siNA. Poly T termination sequences can be added to the constructs to generate U overhangs in the resulting transcript.

[0249] FIG. 9A-E is a diagrammatic representation of a method used to determine target sites for siNA mediated RNAi within a particular target nucleic acid sequence, such as messenger RNA.

[0250] FIG. 9A: A pool of siNA oligonucleotides are synthesized wherein the antisense region of the siNA constructs has complementarity to target sites across the target nucleic acid sequence, and wherein the sense region comprises sequence complementary to the antisense region of the siNA.

[0251] FIGS. 9B&C: (FIG. 9B) The sequences are pooled and are inserted into vectors such that (FIG. 9C) transfection of a vector into cells results in the expression of the siNA.

[0252] FIG. 9D: Cells are sorted based on phenotypic change that is associated with modulation of the target nucleic acid sequence.

[0253] FIG. 9E: The siNA is isolated from the sorted cells and is sequenced to identify efficacious target sites within the target nucleic acid sequence.

[0254] FIG. 10 shows non-limiting examples of different stabilization chemistries (1-10) that can be used, for example, to stabilize the 3′-end of siNA sequences of the invention, including (1) [3-3′]-inverted deoxyribose; (2) deoxyribonucleotide; (3) [5′-3′]-3′-deoxyribonucleotide; (4) [5′-3′]-ribonucleotide; (5) [5′-3′]-3′-O-methyl ribonucleotide; (6) 3′-glyceryl; (7) [3′-5′]-3′-deoxyribonucleotide; (8) [3′-3′]-deoxyribonucleotide; (9) [5′-2′]-deoxyribonucleotide; and (10) [5-3′]-dideoxyribonucleotide. In addition to modified and unmodified backbone chemistries indicated in the figure, these chemistries can be combined with different backbone modifications as described herein, for example, backbone modifications having Formula I. In addition, the 2′-deoxy nucleotide shown 5′ to the terminal modifications shown can be another modified or unmodified nucleotide or non-nucleotide described herein, for example modifications having any of Formulae I-VII or any combination thereof.

[0255] FIG. 11 shows a non-limiting example of a strategy used to identify chemically modified siNA constructs of the invention that are nuclease resistance while preserving the ability to mediate RNAi activity. Chemical modifications are introduced into the siNA construct based on educated design parameters (e.g. introducing 2′-modifications, base modifications, backbone modifications, terminal cap modifications etc). The modified construct in tested in an appropriate system (e.g. human serum for nuclease resistance, shown, or an animal model for PK/delivery parameters). In parallel, the siNA construct is tested for RNAi activity, for example in a cell culture system such as a luciferase reporter assay). Lead siNA constructs are then identified which possess a particular characteristic while maintaining RNAi activity, and can be further modified and assayed once again. This same approach can be used to identify siNA-conjugate molecules with improved pharmacokinetic profiles, delivery, and RNAi activity.

[0256] FIG. 12 shows non-limiting examples of phosphorylated siNA molecules of the invention, including linear and duplex constructs and asymmetric derivatives thereof.

[0257] FIG. 13 shows non-limiting examples of chemically modified terminal phosphate groups of the invention.

[0258] FIG. 14A shows a non-limiting example of methodology used to design self complementary DFO constructs utilizing palidrome and/or repeat nucleic acid sequences that are identified in a target nucleic acid sequence. (i) A palindrome or repeat sequence is identified in a nucleic acid target sequence. (ii) A sequence is designed that is complementary to the target nucleic acid sequence and the palindrome sequence. (iii) An inverse repeat sequence of the non-palindrome/repeat portion of the complementary sequence is appended to the 3′-end of the complementary sequence to generate a self complementary DFO molecule comprising sequence complementary to the nucleic acid target. (iv) The DFO molecule can self-assemble to form a double-stranded oligonucleotide. FIG. 14B shows a non-limiting representative example of a duplex forming oligonucleotide sequence. FIG. 14C shows a non-limiting example of the self assembly schematic of a representative duplex forming oligonucleotide sequence. FIG. 14D shows a non-limiting example of the self assembly schematic of a representative duplex forming oligonucleotide sequence followed by interaction with a target nucleic acid sequence resulting in modulation of gene expression.

[0259] FIG. 15 shows a non-limiting example of the design of self complementary DFO constructs utilizing palidrome and/or repeat nucleic acid sequences that are incorporated into the DFO constructs that have sequence complementary to any target nucleic acid sequence of interest. Incorporation of these palindrome/repeat sequences allow the design of DFO constructs that form duplexes in which each strand is capable of mediating modulation of target gene expression, for example by RNAi. First, the target sequence is identified. A complementary sequence is then generated in which nucleotide or non-nucleotide modifications (shown as X or Y) are introduced into the complementary sequence that generate an artificial palindrome (shown as XYXYXY in the Figure). An inverse repeat of the non-palindrome/repeat complementary sequence is appended to the 3′-end of the complementary sequence to generate a self complementary DFO comprising sequence complementary to the nucleic acid target. The DFO can self-assemble to form a double-stranded oligonucleotide.

[0260] FIG. 16 shows non-limiting examples of multifunctional siNA molecules of the invention comprising two separate polynucleotide sequences that are each capable of mediating RNAi directed cleavage of differing target nucleic acid sequences. FIG. 16A shows a non-limiting example of a multifunctional siNA molecule having a first region that is complementary to a first target nucleic acid sequence (complementary region 1) and a second region that is complementary to a second target nucleic acid sequence (complementary region 2), wherein the first and second complementary regions are situated at the 3′-ends of each polynucleotide sequence in the multifunctional siNA. The dashed portions of each polynucleotide sequence of the multifunctional siNA construct have complementarity with regard to corresponding portions of the siNA duplex, but do not have complementarity to the target nucleic acid sequences. FIG. 16B shows a non-limiting example of a multifunctional siNA molecule having a first region that is complementary to a first target nucleic acid sequence (complementary region 1) and a second region that is complementary to a second target nucleic acid sequence (complementary region 2), wherein the first and second complementary regions are situated at the 5′-ends of each polynucleotide sequence in the multifunctional siNA. The dashed portions of each polynucleotide sequence of the multifunctional siNA construct have complementarity with regard to corresponding portions of the siNA duplex, but do not have complementarity to the target nucleic acid sequences.

[0261] FIG. 17 shows non-limiting examples of multifunctional siNA molecules of the invention comprising a single polynucleotide sequence comprising distinct regions that are each capable of mediating RNAi directed cleavage of differing target nucleic acid sequences. FIG. 17A shows a non-limiting example of a multifunctional siNA molecule having a first region that is complementary to a first target nucleic acid sequence (complementary region 1) and a second region that is complementary to a second target nucleic acid sequence (complementary region 2), wherein the second complementary region is situated at the 3′-end of the polynucleotide sequence in the multifunctional siNA. The dashed portions of each polynucleotide sequence of the multifunctional siNA construct have complementarity with regard to corresponding portions of the siNA duplex, but do not have complementarity to the target nucleic acid sequences. FIG. 17B shows a non-limiting example of a multifunctional siNA molecule having a first region that is complementary to a first target nucleic acid sequence (complementary region 1) and a second region that is complementary to a second target nucleic acid sequence (complementary region 2), wherein the first complementary region is situated at the 5′-end of the polynucleotide sequence in the multifunctional siNA. The dashed portions of each polynucleotide sequence of the multifunctional siNA construct have complementarity with regard to corresponding portions of the siNA duplex, but do not have complementarity to the target nucleic acid sequences. In one embodiment, these multifunctional siNA constructs are processed in vivo or in vitro to generate multifunctional siNA constructs as shown in FIG. 16.

[0262] FIG. 18 shows non-limiting examples of multifunctional siNA molecules of the invention comprising two separate polynucleotide sequences that are each capable of mediating RNAi directed cleavage of differing target nucleic acid sequences and wherein the multifunctional siNA construct further comprises a self complementary, palindrome, or repeat region, thus enabling shorter bifunctional siNA constructs that can mediate RNA interference against differing target nucleic acid sequences. FIG. 18A shows a non-limiting example of a multifunctional siNA molecule having a first region that is complementary to a first target nucleic acid sequence (complementary region 1) and a second region that is complementary to a second target nucleic acid sequence (complementary region 2), wherein the first and second complementary regions are situated at the 3′-ends of each polynucleotide sequence in the multifunctional siNA, and wherein the first and second complementary regions further comprise a self complementary, palindrome, or repeat region. The dashed portions of each polynucleotide sequence of the multifunctional siNA construct have complementarity with regard to corresponding portions of the siNA duplex, but do not have complementarity to the target nucleic acid sequences. FIG. 18B shows a non-limiting example of a multifunctional siNA molecule having a first region that is complementary to a first target nucleic acid sequence (complementary region 1) and a second region that is complementary to a second target nucleic acid sequence (complementary region 2), wherein the first and second complementary regions are situated at the 5′-ends of each polynucleotide sequence in the multifunctional siNA, and wherein the first and second complementary regions further comprise a self complementary, palindrome, or repeat region. The dashed portions of each polynucleotide sequence of the multifunctional siNA construct have complementarity with regard to corresponding portions of the siNA duplex, but do not have complementarity to the target nucleic acid sequences.

[0263] FIG. 19 shows non-limiting examples of multifunctional siNA molecules of the invention comprising a single polynucleotide sequence comprising distinct regions that are each capable of mediating RNAi directed cleavage of differing target nucleic acid sequences and wherein the multifunctional siNA construct further comprises a self complementary, palindrome, or repeat region, thus enabling shorter bifuctional siNA constructs that can mediate RNA interference against differing target nucleic acid sequences. FIG. 19A shows a non-limiting example of a multifunctional siNA molecule having a first region that is complementary to a first target nucleic acid sequence (complementary region 1) and a second region that is complementary to a second target nucleic acid sequence (complementary region 2), wherein the second complementary region is situated at the 3′-end of the polynucleotide sequence in the multifunctional siNA, and wherein the first and second complementary regions further comprise a self complementary, palindrome, or repeat region. The dashed portions of each polynucleotide sequence of the multifunctional siNA construct have complementarity with regard to corresponding portions of the siNA duplex, but do not have complementarity to the target nucleic acid sequences. FIG. 19B shows a non-limiting example of a multifunctional siNA molecule having a first region that is complementary to a first target nucleic acid sequence (complementary region 1) and a second region that is complementary to a second target nucleic acid sequence (complementary region 2), wherein the first complementary region is situated at the 5′-end of the polynucleotide sequence in the multifunctional siNA, and wherein the first and second complementary regions further comprise a self complementary, palindrome, or repeat region. The dashed portions of each polynucleotide sequence of the multifunctional siNA construct have complementarity with regard to corresponding portions of the siNA duplex, but do not have complementarity to the target nucleic acid sequences. In one embodiment, these multifunctional siNA constructs are processed in vivo or in vitro to generate multifunctional siNA constructs as shown in FIG. 18.

[0264] FIG. 20 shows a non-limiting example of how multifunctional siNA molecules of the invention can target two separate target nucleic acid molecules, such as separate RNA molecules encoding differing proteins, for example, differing viral strains, a virus and a cellular protein involved in viral infection or replication, or differing proteins involved in a common or divergent biologic pathway that is implicated in the maintenance of progression of disease. Each strand of the multifunctional siNA construct comprises a region having complementarity to separate target nucleic acid molecules. The multifunctional siNA molecule is designed such that each strand of the siNA can be utilized by the RISC complex to initiate RNA interference mediated cleavage of its corresponding target. These design parameters can include destabilization of each end of the siNA construct (see for example Schwarz et al., 2003, Cell, 115, 199-208). Such destabilization can be accomplished for example by using guanosine-cytidine base pairs, alternate base pairs (e.g., wobbles), or destabilizing chemically modified nucleotides at terminal nucleotide positions as is known in the art.

[0265] FIG. 21 shows a non-limiting example of how multifunctional siNA molecules of the invention can target two separate target nucleic acid sequences within the same target nucleic acid molecule, such as alternate coding regions of a RNA, coding and non-coding regions of a RNA, or alternate splice variant regions of a RNA. Each strand of the multifunctional siNA construct comprises a region having complementarity to the separate regions of the target nucleic acid molecule. The multifunctional siNA molecule is designed such that each strand of the siNA can be utilized by the RISC complex to initiate RNA interference mediated cleavage of its corresponding target region. These design parameters can include destabilization of each end of the siNA construct (see for example Schwarz et al., 2003, Cell, 115, 199-208). Such destabilization can be accomplished for example by using guanosine-cytidine base pairs, alternate base pairs (e.g., wobbles), or destabilizing chemically modified nucleotides at terminal nucleotide positions as is known in the art.

### DETAILED DESCRIPTION OF THE INVENTION

### Mechanism of Action of Nucleic Acid Molecules of the Invention

[0266] The discussion that follows discusses the proposed mechanism of RNA interference mediated by short interfering RNA as is presently known, and is not meant to be limiting and is not an admission of prior art. Applicant demonstrates herein that chemically modified short interfering nucleic acids possess similar or improved capacity to mediate RNAi as do siRNA molecules and are expected to possess improved stability and activity in vivo; therefore, this discussion is not meant to be limiting only to siRNA and can be applied to siNA as a whole. By “improved capacity to mediate RNAi” or “improved RNAi activity” is meant to include RNAi activity measured in vitro and/or in vivo where the RNAi activity is a reflection of both the ability of the siNA to mediate RNAi and the stability of the siNAs of the invention. In this invention, the product of these activities can be increased in vitro and/or in vivo compared to an all RNA siRNA or an siNA containing a plurality of ribonucleotides. In some cases, the activity or stability of the siNA molecule can be decreased (i.e., less than ten-fold), but the overall activity of the siNA molecule is enhanced in vitro and/or in vivo.

[0267] RNA interference refers to the process of sequence specific post-transcriptional gene silencing in animals mediated by short interfering RNAs (siRNAs) (Fire et al., 1998, Nature, 391, 806). The corresponding process in plants is commonly referred to as post-transcriptional gene silencing or RNA silencing and is also referred to as quelling in fungi. The process of post-transcriptional gene silencing is thought to be an evolutionarily-conserved cellular defense mechanism used to prevent the expression of foreign genes which is commonly shared by diverse flora and phyla (Fire et al., 1999, Trends Genet., 15, 358). Such protection from foreign gene expression may have evolved in response to the production of double-stranded RNAs (dsRNAs) derived from viral infection or the random integration of transposon elements into a host genome via a cellular response that specifically destroys homologous single-stranded RNA or viral genomic RNA. The presence of dsRNA in cells triggers the RNAi response though a mechanism that has yet to be fully characterized. This mechanism appears to be different from the interferon response that results from dsRNA-mediated activation of protein kinase PKR and 2′,5′-oligoadenylate synthetase resulting in non-specific cleavage of mRNA by ribonuclease L.

[0268] The presence of long dsRNAs in cells stimulates the activity of a ribonuclease III enzyme referred to as Dicer. Dicer is involved in the processing of the dsRNA into short pieces of dsRNA known as short interfering RNAs (siRNAs) (Berstein et al., 2001, Nature, 409, 363). Short interfering RNAs derived from Dicer activity are typically about 21 to about 23 nucleotides in length and comprise about 19 base pair duplexes. Dicer has also been implicated in the excision of 21- and 22-nucleotide small temporal RNAs (stRNAs) from precursor RNA of conserved structure that are implicated in translational control (Hutvagner et al., 2001, Science, 293, 834). The RNAi response also features an endonuclease complex containing an siRNA, commonly referred to as an RNA-induced silencing complex (RISC), which mediates cleavage of single-stranded RNA having sequence homologous to the siRNA. Cleavage of the target RNA takes place in the middle of the region complementary to the guide sequence of the siRNA duplex (Elbashir et al., 2001, Genes Dev., 15, 188). In addition, RNA interference can also involve small RNA (e.g., micro-RNA or miRNA) mediated gene silencing, presumably though cellular mechanisms that regulate chromatin structure and thereby prevent transcription of target gene sequences (see for example Allshire, 2002, Science, 297, 1818-1819; Volpe et al., 2002, Science, 297, 1833-1837; Jenuwein, 2002, Science, 297, 2215-2218; and Hall et al., 2002, Science, 297, 2232-2237). As such, siNA molecules of the invention can be used to mediate gene silencing via interaction with RNA transcripts or alternately by interaction with particular gene sequences, wherein such interaction results in gene silencing either at the transcriptional level or post-transcriptional level.

[0269] RNAi has been studied in a variety of systems. Fire et al., 1998, Nature, 391, 806, were the first to observe RNAi in C. elegans. Wianny and Goetz, 1999, Nature Cell Biol., 2, 70, describe RNAi mediated by dsRNA in mouse embryos. Hammond et al., 2000, Nature, 404, 293, describe RNAi in Drosophila cells transfected with dsRNA. Elbashir et al., 2001, Nature, 411, 494, describe RNAi induced by introduction of duplexes of synthetic 21-nucleotide RNAs in cultured mammalian cells including human embryonic kidney and HeLa cells. Recent work in Drosophila embryonic lysates has revealed certain requirements for siRNA length, structure, chemical composition, and sequence that are essential to mediate efficient RNAi activity. These studies have shown that 21 nucleotide siRNA duplexes are most active when containing two 2-nucleotide 3′-terminal nucleotide overhangs. Furthermore, substitution of one or both siRNA strands with 2′-deoxy or 2′-O-methyl nucleotides abolishes RNAi activity, whereas substitution of 3′-terminal siRNA nucleotides with deoxy nucleotides was shown to be tolerated. Mismatch sequences in the center of the siRNA duplex were also shown to abolish RNAi activity. In addition, these studies also indicate that the position of the cleavage site in the target RNA is defined by the 5′-end of the siRNA guide sequence rather than the 3′-end (Elbashir et al., 2001, EMBO J., 20, 6877). Other studies have indicated that a 5′-phosphate on the target-complementary strand of an siRNA duplex is required for siRNA activity and that ATP is utilized to maintain the 5′-phosphate moiety on the siRNA (Nykanen et al., 2001, Cell, 107, 309); however, siRNA molecules lacking a 5′-phosphate are active when introduced exogenously, suggesting that 5′-phosphorylation of siRNA constructs may occur in vivo.

### Synthesis of Nucleic Acid Molecules

[0270] Synthesis of nucleic acids greater than 100 nucleotides in length is difficult using automated methods, and the therapeutic cost of such molecules is prohibitive. In this invention, small nucleic acid motifs (“small” refers to nucleic acid motifs no more than 100 nucleotides in length, preferably no more than 80 nucleotides in length, and most preferably no more than 50 nucleotides in length; e.g., individual siNA oligonucleotide sequences or siNA sequences synthesized in tandem) are preferably used for exogenous delivery. The simple structure of these molecules increases the ability of the nucleic acid to invade targeted regions of protein and/or RNA structure. Exemplary molecules of the instant invention are chemically synthesized, and others can similarly be synthesized.

[0271] Oligonucleotides (e.g., certain modified oligonucleotides or portions of oligonucleotides lacking ribonucleotides) are synthesized using protocols known in the art, for example as described in Caruthers et al., 1992, Methods in Enzymology 211, 3-19, Thompson et al., International PCT Publication No. WO 99/54459, Wincott et al., 1995, Nucleic Acids Res. 23, 2677-2684, Wincott et al., 1997, Methods Mol. Bio., 74, 59, Brennan et al., 1998, Biotechnol Bioeng., 61, 33-45, and Brennan, U.S. Pat. No. 6,001,311. All of these references are incorporated herein by reference. The synthesis of oligonucleotides makes use of common nucleic acid protecting and coupling groups, such as dimethoxytrityl at the 5′-end, and phosphoramidites at the 3′-end. In a non-limiting example, small scale syntheses are conducted on a 394 Applied Biosystems, Inc. synthesizer using a 0.2 μmol scale protocol with a 2.5 min coupling step for 2′-O-methylated nucleotides and a 45 second coupling step for 2′-deoxy nucleotides or 2′-deoxy-2′-fluoro nucleotides. Table V outlines the amounts and the contact times of the reagents used in the synthesis cycle. Alternatively, syntheses at the 0.2 μmol scale can be performed on a 96-well plate synthesizer, such as the instrument produced by Protogene (Palo Alto, Calif.) with minimal modification to the cycle. A 33-fold excess (60 μL of 0.11 M=6.6 μmol) of 2′-O-methyl phosphoramidite and a 105-fold excess of S-ethyl tetrazole (60 μL of 0.25 M=15 μmol) can be used in each coupling cycle of 2′-O-methyl residues relative to polymer-bound 5′-hydroxyl. A 22-fold excess (40 μL of 0.11 M=4.4 μmol) of deoxy phosphoramidite and a 70-fold excess of S-ethyl tetrazole (40 μL of 0.25 M=10 μmol) can be used in each coupling cycle of deoxy residues relative to polymer-bound 5′-hydroxyl. Average coupling yields on the 394 Applied Biosystems, Inc. synthesizer, determined by colorimetric quantitation of the trityl fractions, are typically 97.5-99%. Other oligonucleotide synthesis reagents for the 394 Applied Biosystems, Inc. synthesizer include the following: detritylation solution is 3% TCA in methylene chloride (ABI); capping is performed with 16% N-methyl imidazole in THF (ABI) and 10% acetic anhydride/10% 2,6-lutidine in THF (ABI); and oxidation solution is 16.9 mM 12, 49 mM pyridine, 9% water in THF (PerSeptive Biosystems, Inc.). Burdick & Jackson Synthesis Grade acetonitrile is used directly from the reagent bottle. S-Ethyltetrazole solution (0.25 M in acetonitrile) is made up from the solid obtained from American International Chemical, Inc. Alternately, for the introduction of phosphorothioate linkages, Beaucage reagent (3H-1,2-Benzodithiol-3-one 1,1-dioxide, 0.05 M in acetonitrile) is used.

[0272] Deprotection of the DNA-based oligonucleotides is performed as follows: the polymer-bound trityl-on oligoribonucleotide is transferred to a 4 mL glass screw top vial and suspended in a solution of 40% aqueous methylamine (1 mL) at 65° C. for 10 minutes. After cooling to −20° C., the supernatant is removed from the polymer support. The support is washed three times with 1.0 mL of EtOH:MeCN:H₂O/3:1:1, vortexed and the supernatant is then added to the first supernatant. The combined supernatants, containing the oligoribonucleotide, are dried to a white powder.

[0273] The method of synthesis used for RNA including certain siNA molecules of the invention follows the procedure as described in Usman et al., 1987, J. Am. Chem. Soc., 109, 7845; Scaringe et al., 1990, Nucleic Acids Res., 18, 5433; and Wincott et al., 1995, Nucleic Acids Res. 23, 2677-2684 Wincott et al., 1997,Methods Mol. Bio., 74, 59, and makes use of common nucleic acid protecting and coupling groups, such as dimethoxytrityl at the 5′-end, and phosphoramidites at the 3′-end. In a non-limiting example, small scale syntheses are conducted on a 394 Applied Biosystems, Inc. synthesizer using a 0.2 μmol scale protocol with a 7.5 min coupling step for alkylsilyl protected nucleotides and a 2.5 min coupling step for 2′-O-methylated nucleotides. Table V outlines the amounts and the contact times of the reagents used in the synthesis cycle. Alternatively, syntheses at the 0.2 μmol scale can be done on a 96-well plate synthesizer, such as the instrument produced by Protogene (Palo Alto, Calif.) with minimal modification to the cycle. A 33-fold excess (60 μL of 0.11 M=6.6 μmol) of 2′-O-methyl phosphoramidite and a 75-fold excess of S-ethyl tetrazole (60 μL of 0.25 M=15 μmol) can be used in each coupling cycle of 2′-O-methyl residues relative to polymer-bound 5′-hydroxyl. A 66-fold excess (120 μL of 0.11 M=13.2 μmol) of alkylsilyl (ribo) protected phosphoramidite and a 150-fold excess of S-ethyl tetrazole (120 μL of 0.25 M=30 μmol) can be used in each coupling cycle of ribo residues relative to polymer-bound 5′-hydroxyl. Average coupling yields on the 394 Applied Biosystems, Inc. synthesizer, determined by colorimetric quantitation of the trityl fractions, are typically 97.5-99%. Other oligonucleotide synthesis reagents for the 394 Applied Biosystems, Inc. synthesizer include the following: detritylation solution is 3% TCA in methylene chloride (ABI); capping is performed with 16% N-methyl imidazole in THF (ABI) and 10% acetic anhydride/10% 2,6-lutidine in THF (ABI); oxidation solution is 16.9 mM 12, 49 mM pyridine, 9% water in THF (PerSeptive Biosystems, Inc.). Burdick & Jackson Synthesis Grade acetonitrile is used directly from the reagent bottle. S-Ethyltetrazole solution (0.25 M in acetonitrile) is made up from the solid obtained from American International Chemical, Inc. Alternately, for the introduction of phosphorothioate linkages, Beaucage reagent (3H-1,2-Benzodithiol-3-one 1,1-dioxide 0.05 M in acetonitrile) is used.

[0274] Deprotection of the RNA is performed using either a two-pot or one-pot protocol. For the two-pot protocol, the polymer-bound trityl-on oligoribonucleotide is transferred to a 4 mL glass screw top vial and suspended in a solution of 40% aq. methylamine (1 mL) at 65° C. for 10 min. After cooling to −20° C., the supernatant is removed from the polymer support. The support is washed three times with 1.0 mL of EtOH:MeCN:H₂O/3:1:1, vortexed and the supernatant is then added to the first supernatant. The combined supernatants, containing the oligoribonucleotide, are dried to a white powder. The base deprotected oligoribonucleotide is resuspended in anhydrous TEA/HF/NMP solution (300 μL of a solution of 1.5 mL N-methylpyrrolidinone, 750 μL TEA and 1 mL TEA-3HF to provide a 1.4 M HF concentration) and heated to 65° C. After 1.5 h, the oligomer is quenched with 1.5 M NH₄HCO₃.

[0275] Alternatively, for the one-pot protocol, the polymer-bound trityl-on oligoribonucleotide is transferred to a 4 mL glass screw top vial and suspended in a solution of 33% ethanolic methylamine/DMSO:1/1 (0.8 mL) at 65° C. for 15 minutes. The vial is brought to room temperature TEA.3HF (0.1 mL) is added and the vial is heated at 65° C. for 15 minutes. The sample is cooled at −20° C. and then quenched with 1.5 M NH₄HCO₃.

[0276] For purification of the trityl-on oligomers, the quenched NH₄HCO₃ solution is loaded onto a C-18 containing cartridge that had been prewashed with acetonitrile followed by 50 mM TEAA. After washing the loaded cartridge with water, the RNA is detritylated with 0.5% TFA for 13 minutes. The cartridge is then washed again with water, salt exchanged with 1 M NaCl and washed with water again. The oligonucleotide is then eluted with 30% acetonitrile.

[0277] The average stepwise coupling yields are typically >98% (Wincott et al., 1995 Nucleic Acids Res. 23, 2677-2684). Those of ordinary skill in the art will recognize that the scale of synthesis can be adapted to be larger or smaller than the example described above including but not limited to 96-well format.

[0278] Alternatively, the nucleic acid molecules of the present invention can be synthesized separately and joined together post-synthetically, for example, by ligation (Moore et al., 1992, Science 256, 9923; Draper et al., International PCT publication No. WO 93/23569; Shabarova et al., 1991, Nucleic Acids Research 19, 4247; Bellon et al., 1997, Nucleosides & Nucleotides, 16, 951; Bellon et al., 1997, Bioconjugate Chem. 8, 204), or by hybridization following synthesis and/or deprotection.

[0279] The siNA molecules of the invention can also be synthesized via a tandem synthesis methodology as described in Example I herein, wherein both siNA strands are synthesized as a single contiguous oligonucleotide fragment or strand separated by a cleavable linker which is subsequently cleaved to provide separate siNA fragments or strands that hybridize and permit purification of the siNA duplex. The linker can be a polynucleotide linker or a non-nucleotide linker. The tandem synthesis of siNA as described herein can be readily adapted to both multiwell/multiplate synthesis platforms such as 96 well or similarly larger multi-well platforms. The tandem synthesis of siNA as described herein can also be readily adapted to large scale synthesis platforms employing batch reactors, synthesis columns and the like.

[0280] An siNA molecule can also be assembled from two distinct nucleic acid strands or fragments wherein one fragment includes the sense region and the second fragment includes the antisense region of the RNA molecule.

[0281] The nucleic acid molecules of the present invention can be modified extensively to enhance stability by modification with nuclease resistant groups, for example, 2′-amino, 2′-C-allyl, 2′-fluoro, 2′-O-methyl, 2′-H (for a review see Usman and Cedergren, 1992, TIBS 17, 34; Usman et al., 1994, Nucleic Acids Symp. Ser. 31, 163). siNA constructs can be purified by gel electrophoresis using general methods or can be purified by high pressure liquid chromatography (HPLC; see Wincott et al., supra, the totality of which is hereby incorporated herein by reference) and re-suspended in water.

[0282] In another aspect of the invention, siNA molecules of the invention are expressed from transcription units inserted into DNA or RNA vectors. The recombinant vectors can be DNA plasmids or viral vectors. siNA expressing viral vectors can be constructed based on, but not limited to, adeno-associated virus, retrovirus, adenovirus, or alphavirus. The recombinant vectors capable of expressing the siNA molecules can be delivered as described herein, and persist in target cells. Alternatively, viral vectors can be used that provide for transient expression of siNA molecules.

### Optimizing Activity of the Nucleic Acid Molecule of the Invention.

[0283] Chemically synthesizing nucleic acid molecules with modifications (base, sugar and/or phosphate) can prevent their degradation by serum ribonucleases, which can increase their potency (see e.g., Eckstein et al., International Publication No. WO 92/07065; Perrault et al., 1990 Nature 344, 565; Pieken et al., 1991, Science 253, 314; Usman and Cedergren, 1992, Trends in Biochem. Sci. 17, 334; Usman et al., International Publication No. WO 93/15187; and Rossi et al., International Publication No. WO 91/03162; Sproat, U.S. Pat. No. 5,334,711; Gold et al., U.S. Pat. No. 6,300,074; and Burgin et al., supra; all of which are incorporated by reference herein). All of the above references describe various chemical modifications that can be made to the base, phosphate and/or sugar moieties of the nucleic acid molecules described herein. Modifications that enhance their efficacy in cells, and removal of bases from nucleic acid molecules to shorten oligonucleotide synthesis times and reduce chemical requirements are desired.

[0284] There are several examples in the art describing sugar, base and phosphate modifications that can be introduced into nucleic acid molecules with significant enhancement in their nuclease stability and efficacy. For example, oligonucleotides are modified to enhance stability and/or enhance biological activity by modification with nuclease resistant groups, for example, 2′-amino, 2′-C-allyl, 2′-fluoro, 2′-O-methyl, 2′-O-allyl, 2′-H, nucleotide base modifications (for a review see Usman and Cedergren, 1992, TIBS. 17, 34; Usman et al., 1994, Nucleic Acids Symp. Ser. 31, 163; Burgin et al., 1996, Biochemistry, 35, 14090). Sugar modification of nucleic acid molecules have been extensively described in the art (see Eckstein et al., International Publication PCT No. WO 92/07065; Perrault et al. Nature, 1990, 344, 565-568; Pieken et al. Science, 1991, 253, 314-317; Usman and Cedergren, Trends in Biochem. Sci., 1992, 17, 334-339; Usman et al. International Publication PCT No. WO 93/15187; Sproat, U.S. Pat. No. 5,334,711 and Beigelman et al., 1995, J. Biol. Chem., 270, 25702; Beigelman et al., International PCT publication No. WO 97/26270; Beigelman et al., U.S. Pat. No. 5,716,824; Usman et al., U.S. Pat. No. 5,627,053; Woolf et al., International PCT Publication No. WO 98/13526; Thompson et al., U.S. Ser. No. 60/082,404 which was filed on Apr. 20, 1998; Karpeisky et al., 1998, Tetrahedron Lett., 39, 1131; Earnshaw and Gait, 1998, Biopolymers (Nucleic Acid Sciences), 48, 39-55; Verma and Eckstein, 1998, Annu. Rev. Biochem., 67, 99-134; and Burlina et al., 1997, Bioorg. Med. Chem., 5, 1999-2010; all of the references are hereby incorporated in their totality by reference herein). Such publications describe general methods and strategies to determine the location of incorporation of sugar, base and/or phosphate modifications and the like into nucleic acid molecules without modulating catalysis, and are incorporated by reference herein. In view of such teachings, similar modifications can be used as described herein to modify the siNA nucleic acid molecules of the instant invention so long as the ability of siNA to promote RNAi is cells is not significantly inhibited.

[0285] While chemical modification of oligonucleotide internucleotide linkages with phosphorothioate, phosphorodithioate, and/or 5′-methylphosphonate linkages improves stability, excessive modifications can cause some toxicity or decreased activity. Therefore, when designing nucleic acid molecules, the amount of these internucleotide linkages should be minimized. The reduction in the concentration of these linkages should lower toxicity, resulting in increased efficacy and higher specificity of these molecules.

[0286] Short interfering nucleic acid (siNA) molecules having chemical modifications that maintain or enhance activity are provided. Such a nucleic acid is also generally more resistant to nucleases than an unmodified nucleic acid. Accordingly, the in vitro and/or in vivo activity should not be significantly lowered. In cases in which modulation is the goal, therapeutic nucleic acid molecules delivered exogenously should optimally be stable within cells until translation of the target RNA has been modulated long enough to reduce the levels of the undesirable protein. This period of time varies between hours to days depending upon the disease state. Improvements in the chemical synthesis of RNA and DNA (Wincott et al., 1995, Nucleic Acids Res. 23, 2677; Caruthers et al., 1992, Methods in Enzymology 211, 3-19 (incorporated by reference herein)) have expanded the ability to modify nucleic acid molecules by introducing nucleotide modifications to enhance their nuclease stability, as described above.

[0287] In one embodiment, nucleic acid molecules of the invention include one or more (e.g., about 1, 2, 3, 4, 5, 6, 7, 8, 9, 10, or more) G-clamp nucleotides. A G-clamp nucleotide is a modified cytosine analog wherein the modifications confer the ability to hydrogen bond both Watson-Crick and Hoogsteen faces of a complementary guanine within a duplex, see for example Lin and Matteucci, 1998, J. Am. Chem. Soc., 120, 8531-8532. A single G-clamp analog substitution within an oligonucleotide can result in substantially enhanced helical thermal stability and mismatch discrimination when hybridized to complementary oligonucleotides. The inclusion of such nucleotides in nucleic acid molecules of the invention results in both enhanced affinity and specificity to nucleic acid targets, complementary sequences, or template strands. In another embodiment, nucleic acid molecules of the invention include one or more (e.g., about 1, 2, 3, 4, 5, 6, 7, 8, 9, 10, or more) LNA “locked nucleic acid” nucleotides such as a 2′,4′-C methylene bicyclo nucleotide (see for example Wengel et al., International PCT Publication No. WO 00/66604 and WO 99/14226).

[0288] In another embodiment, the invention features conjugates and/or complexes of siNA molecules of the invention. Such conjugates and/or complexes can be used to facilitate delivery of siNA molecules into a biological system, such as a cell. The conjugates and complexes provided by the instant invention can impart therapeutic activity by transferring therapeutic compounds across cellular membranes, altering the pharmacokinetics, and/or modulating the localization of nucleic acid molecules of the invention. The present invention encompasses the design and synthesis of novel conjugates and complexes for the delivery of molecules, including, but not limited to, small molecules, lipids, cholesterol, phospholipids, nucleosides, nucleotides, nucleic acids, antibodies, toxins, negatively charged polymers and other polymers, for example proteins, peptides, hormones, carbohydrates, polyethylene glycols, or polyamines, across cellular membranes. In general, the transporters described are designed to be used either individually or as part of a multi-component system, with or without degradable linkers. These compounds are expected to improve delivery and/or localization of nucleic acid molecules of the invention into a number of cell types originating from different tissues, in the presence or absence of serum (see Sullenger and Cech, U.S. Pat. No. 5,854,038). Conjugates of the molecules described herein can be attached to biologically active molecules via linkers that are biodegradable, such as biodegradable nucleic acid linker molecules.

[0289] The term “biodegradable linker” as used herein, refers to a nucleic acid or non-nucleic acid linker molecule that is designed as a biodegradable linker to connect one molecule to another molecule, for example, a biologically active molecule to an siNA molecule of the invention or the sense and antisense strands of an siNA molecule of the invention. The biodegradable linker is designed such that its stability can be modulated for a particular purpose, such as delivery to a particular tissue or cell type. The stability of a nucleic acid-based biodegradable linker molecule can be modulated by using various chemistries, for example combinations of ribonucleotides, deoxyribonucleotides, and chemically modified nucleotides, such as 2′-O-methyl, 2′-fluoro, 2′-amino, 2′-O-amino, 2′-C-allyl, 2′-O-allyl, and other 2′-modified or base modified nucleotides. The biodegradable nucleic acid linker molecule can be a dimer, trimer, tetramer or longer nucleic acid molecule, for example, an oligonucleotide of about 2, 3, 4, 5, 6, 7, 8, 9, 10, 11, 12, 13, 14, 15, 16, 17, 18, 19, or 20 nucleotides in length, or can comprise a single nucleotide with a phosphorus-based linkage, for example, a phosphoramidate or phosphodiester linkage. The biodegradable nucleic acid linker molecule can also comprise nucleic acid backbone, nucleic acid sugar, or nucleic acid base modifications.

[0290] The term “biodegradable” as used herein, refers to degradation in a biological system, for example enzymatic degradation or chemical degradation.

[0291] The term “biologically active molecule” as used herein, refers to compounds or molecules that are capable of eliciting or modifying a biological response in a system. Non-limiting examples of biologically active siNA molecules either alone or in combination with other molecules contemplated by the instant invention include therapeutically active molecules such as antibodies, cholesterol, hormones, antivirals, peptides, proteins, chemotherapeutics, small molecules, vitamins, co-factors, nucleosides, nucleotides, oligonucleotides, enzymatic nucleic acids, antisense nucleic acids, triplex forming oligonucleotides, 2,5-A chimeras, siNA, dsRNA, allozymes, aptamers, decoys and analogs thereof. Biologically active molecules of the invention also include molecules capable of modulating the pharmacokinetics and/or pharmacodynamics of other biologically active molecules, for example, lipids and polymers such as polyamines, polyamides, polyethylene glycol and other polyethers.

[0292] The term “phospholipid” as used herein, refers to a hydrophobic molecule comprising at least one phosphorus group. For example, a phospholipid can comprise a phosphorus-containing group and saturated or unsaturated alkyl group, optionally substituted with OH, COOH, oxo, amine, or substituted or unsubstituted aryl groups.

[0293] Therapeutic nucleic acid molecules (e.g., siNA molecules) delivered exogenously optimally are stable within cells until reverse transcription of the RNA has been modulated long enough to reduce the levels of the RNA transcript. The nucleic acid molecules are resistant to nucleases in order to function as effective intracellular therapeutic agents. Improvements in the chemical synthesis of nucleic acid molecules described in the instant invention and in the art have expanded the ability to modify nucleic acid molecules by introducing nucleotide modifications to enhance their nuclease stability as described above.

[0294] In yet another embodiment, siNA molecules having chemical modifications that maintain or enhance enzymatic activity of proteins involved in RNAi are provided. Such nucleic acids are also generally more resistant to nucleases than unmodified nucleic acids. Thus, in vitro and/or in vivo the activity should not be significantly lowered.

[0295] Use of the nucleic acid-based molecules of the invention will lead to better treatment of the disease progression by affording the possibility of combination therapies (e.g., multiple siNA molecules targeted to different genes; nucleic acid molecules coupled with known small molecule modulators; or intermittent treatment with combinations of molecules, including different motifs and/or other chemical or biological molecules). The treatment of subjects with siNA molecules can also include combinations of different types of nucleic acid molecules, such as enzymatic nucleic acid molecules (ribozymes), allozymes, antisense, 2,5-A oligoadenylate, decoys, and aptamers.

[0296] In another aspect an siNA molecule of the invention comprises one or more 5′ and/or a 3′-cap structure, for example on only the sense siNA strand, the antisense siNA strand, or both siNA strands.

[0297] By “cap structure” is meant chemical modifications, which have been incorporated at either terminus of the oligonucleotide (see, for example, Adamic et al., U.S. Pat. No. 5,998,203, incorporated by reference herein). These terminal modifications protect the nucleic acid molecule from exonuclease degradation, and may help in delivery and/or localization within a cell. The cap may be present at the 5′-terminus (5′-cap) or at the 3′-terminal (3′-cap) or may be present on both termini. In non-limiting examples, the 5′-cap includes, but is not limited to, glyceryl, inverted deoxy abasic residue (moiety); 4′,5′-methylene nucleotide; 1-(beta-D-erythrofuranosyl) nucleotide, 4′-thio nucleotide; carbocyclic nucleotide; 1,5-anhydrohexitol nucleotide; L-nucleotides; alpha-nucleotides; modified base nucleotide; phosphorodithioate linkage; threo-pentofuranosyl nucleotide; acyclic 3′,4′-seco nucleotide; acyclic 3,4-dihydroxybutyl nucleotide; acyclic 3,5-dihydroxypentyl nucleotide, 3′-3′-inverted nucleotide moiety; 3′-3′-inverted abasic moiety; 3′-2′-inverted nucleotide moiety; 3′-2′-inverted abasic moiety; 1,4-butanediol phosphate; 3′-phosphoramidate; hexylphosphate; aminohexyl phosphate; 3′-phosphate; 3′-phosphorothioate; phosphorodithioate; or bridging or non-bridging methylphosphonate moiety.

[0298] Non-limiting examples of the 3′-cap include, but are not limited to, glyceryl, inverted deoxy abasic residue (moiety), 4′,5′-methylene nucleotide; 1-(beta-D-erythrofuranosyl) nucleotide; 4′-thio nucleotide, carbocyclic nucleotide; 5′-amino-alkyl phosphate; 1,3-diamino-2-propyl phosphate; 3-aminopropyl phosphate; 6-aminohexyl phosphate; 1,2-aminododecyl phosphate; hydroxypropyl phosphate; 1,5-anhydrohexitol nucleotide; L-nucleotide; alpha-nucleotide; modified base nucleotide; phosphorodithioate; threo-pentofuranosyl nucleotide; acyclic 3′,4′-seco nucleotide; 3,4-dihydroxybutyl nucleotide; 3,5-dihydroxypentyl nucleotide, 5′-5′-inverted nucleotide moiety; 5′-5′-inverted abasic moiety; 5′-phosphoramidate; 5′-phosphorothioate; 1,4-butanediol phosphate; 5′-amino; bridging and/or non-bridging 5′-phosphoramidate, phosphorothioate and/or phosphorodithioate, bridging or non bridging methylphosphonate and 5′-mercapto moieties (for more details see Beaucage and Iyer, 1993, Tetrahedron 49, 1925; incorporated by reference herein).

[0299] By the term “non-nucleotide” is meant any group or compound which can be incorporated into a nucleic acid chain in the place of one or more nucleotide units, including either sugar and/or phosphate substitutions, and allows the remaining bases to exhibit their enzymatic activity. The group or compound is abasic in that it does not contain a commonly recognized nucleotide base, such as adenosine, guanine, cytosine, uracil or thymine and therefore lacks a base at the 1′-position.

[0300] An “alkyl” group refers to a saturated aliphatic hydrocarbon, including straight-chain, branched-chain, and cyclic alkyl groups. Preferably, the alkyl group has 1 to 12 carbons. More preferably, it is a lower alkyl of from 1 to 7 carbons, more preferably 1 to 4 carbons. The alkyl group can be substituted or unsubstituted. When substituted the substituted group(s) is preferably, hydroxyl, cyano, alkoxy, ═O, ═S, NO₂ or N(CH₃)₂, amino, or SH. The term also includes alkenyl groups that are unsaturated hydrocarbon groups containing at least one carbon-carbon double bond, including straight-chain, branched-chain, and cyclic groups. Preferably, the alkenyl group has 1 to 12 carbons. More preferably, it is a lower alkenyl of from 1 to 7 carbons, more preferably 1 to 4 carbons. The alkenyl group may be substituted or unsubstituted. When substituted the substituted group(s) is preferably, hydroxyl, cyano, alkoxy, ═O, ═S, NO₂, halogen, N(CH₃)₂, amino, or SH. The term “alkyl” also includes alkynyl groups that have an unsaturated hydrocarbon group containing at least one carbon-carbon triple bond, including straight-chain, branched-chain, and cyclic groups. Preferably, the alkynyl group has 1 to 12 carbons. More preferably, it is a lower alkynyl of from 1 to 7 carbons, more preferably 1 to 4 carbons. The alkynyl group may be substituted or unsubstituted. When substituted the substituted group(s) is preferably, hydroxyl, cyano, alkoxy, ═O, ═S, NO₂ or N(CH₃)₂, amino or SH.

[0301] Such alkyl groups can also include aryl, alkylaryl, carbocyclic aryl, heterocyclic aryl, amide and ester groups. An “aryl” group refers to an aromatic group that has at least one ring having a conjugated pi electron system and includes carbocyclic aryl, heterocyclic aryl and biaryl groups, all of which may be optionally substituted. The preferred substituent(s) of aryl groups are halogen, trihalomethyl, hydroxyl, SH, OH, cyano, alkoxy, alkyl, alkenyl, alkynyl, and amino groups. An “alkylaryl” group refers to an alkyl group (as described above) covalently joined to an aryl group (as described above). Carbocyclic aryl groups are groups wherein the ring atoms on the aromatic ring are all carbon atoms. The carbon atoms are optionally substituted. Heterocyclic aryl groups are groups having from 1 to 3 heteroatoms as ring atoms in the aromatic ring and the remainder of the ring atoms are carbon atoms. Suitable heteroatoms include oxygen, sulfur, and nitrogen, and suitable heterocyclic groups include furanyl, thienyl, pyridyl, pyrrolyl, N-lower alkyl pyrrolo, pyrimidyl, pyrazinyl, imidazolyl and the like, all optionally substituted. An “amide” refers to an —C(O)—NH—R, where R is either alkyl, aryl, alkylaryl or hydrogen. An “ester” refers to an —C(O)—OR′, where R is either alkyl, aryl, alkylaryl or hydrogen.

[0302] “Nucleotide” as used herein, and as recognized in the art, includes natural bases (standard), and modified bases well known in the art. Such bases are generally located at the 1′ position of a nucleotide sugar moiety. Nucleotides generally comprise a base, sugar and a phosphate group. The nucleotides can be unmodified or modified at the sugar, phosphate and/or base moiety, (also referred to interchangeably as nucleotide analogs, modified nucleotides, non-natural nucleotides, non-standard nucleotides and other; see, for example, Usman and McSwiggen, supra; Eckstein et al., International PCT Publication No. WO 92/07065; Usman et al., International PCT Publication No. WO 93/15187; Uhlman & Peyman, supra, all are hereby incorporated by reference herein). There are several examples of modified nucleic acid bases known in the art as summarized by Limbach et al., 1994, Nucleic Acids Res. 22, 2183. Some of the non-limiting examples of base modifications that can be introduced into nucleic acid molecules include, inosine, purine, pyridin-4-one, pyridin-2-one, phenyl, pseudouracil, 2,4,6-trimethoxy benzene, 3-methyl uracil, dihydrouridine, naphthyl, aminophenyl, 5-alkylcytidines (e.g., 5-methylcytidine), 5-alkyluridines (e.g., ribothymidine), 5-halouridine (e.g., 5-bromouridine) or 6-azapyrimidines or 6-alkylpyrimidines (e.g. 6-methyluridine), propyne, and others (Burgin et al., 1996, Biochemistry, 35, 14090; Uhlman & Peyman, supra). By “modified bases” in this aspect is meant nucleotide bases other than adenine, guanine, cytosine and uracil at 1′ position or their equivalents.

[0303] In one embodiment, the invention features modified siNA molecules, with phosphate backbone modifications comprising one or more phosphorothioate, phosphorodithioate, methylphosphonate, phosphotriester, morpholino, amidate carbamate, carboxymethyl, acetamidate, polyamide, sulfonate, sulfonamide, sulfamate, formacetal, thioformacetal, and/or alkylsilyl, substitutions. For a review of oligonucleotide backbone modifications, see Hunziker and Leumann, 1995, Nucleic Acid Analogues: Synthesis and Properties, in Modern Synthetic Methods, VCH, 331-417, and Mesmaeker et al., 1994, Novel Backbone Replacements for Oligonucleotides, in Carbohydrate Modifications in Antisense Research, ACS, 24-39.

[0304] By “abasic” is meant sugar moieties lacking a base or having other chemical groups in place of a base at the 1′ position, see for example Adamic et al., U.S. Pat. No. 5,998,203.

[0305] By “unmodified nucleoside” is meant one of the bases adenine, cytosine, guanine, thymine, or uracil joined to the 1′ carbon of β-D-ribo-furanose.

[0306] By “modified nucleoside” is meant any nucleotide base which contains a modification in the chemical structure of an unmodified nucleotide base, sugar and/or phosphate. Non-limiting examples of modified nucleotides are shown by Formulae I-VII and/or other modifications described herein.

[0307] In connection with 2′-modified nucleotides as described for the present invention, by “amino” is meant 2′—NH₂ or 2′-O—NH₂, which can be modified or unmodified. Such modified groups are described, for example, in Eckstein et al., U.S. Pat. No. 5,672,695 and Matulic-Adamic et al., U.S. Pat. No. 6,248,878, which are both incorporated by reference in their entireties.

[0308] Various modifications to nucleic acid siNA structure can be made to enhance the utility of these molecules. Such modifications will enhance shelf-life, half-life in vitro, stability, and ease of introduction of such oligonucleotides to the target site, e.g., to enhance penetration of cellular membranes, and confer the ability to recognize and bind to targeted cells.

### Administration of Nucleic Acid Molecules

[0309] An siRNA molecule of the invention can be adapted for use to treat for example SARS virus infection, acute respiratory failure, viral pneumonia, and other indications that can respond to the level of SARS in a cell or tissue, alone or in combination with other therapies. For example, an siNA molecule can comprise a delivery vehicle, including liposomes, for administration to a subject, carriers and diluents and their salts, and/or can be present in pharmaceutically acceptable formulations. Methods for the delivery of nucleic acid molecules are described in Akhtar et al., 1992, Trends Cell Bio., 2, 139; Delivery Strategies for Antisense Oligonucleotide Therapeutics, ed. Akhtar, 1995, Maurer et al., 1999, Mol. Membr. Biol., 16, 129-140; Hofland and Huang, 1999, Handb. Exp. Pharmacol., 137, 165-192; and Lee et al., 2000, ACS Symp. Ser., 752, 184-192, all of which are incorporated herein by reference. Beigelman et al., U.S. Pat. No. 6,395,713 and Sullivan et al., PCT WO 94/02595 further describe the general methods for delivery of nucleic acid molecules. These protocols can be utilized for the delivery of virtually any nucleic acid molecule. Nucleic acid molecules can be administered to cells by a variety of methods known to those of skill in the art, including, but not restricted to, encapsulation in liposomes, by iontophoresis, or by incorporation into other vehicles, such as biodegradable polymers, hydrogels, cyclodextrins (see for example Gonzalez et al., 1999, Bioconjugate Chem., 10, 1068-1074; Wang et al., International PCT publication Nos. WO 03/47518 and WO 03/46185), poly(lactic-co-glycolic)acid (PLGA) and PLCA microspheres (see for example U.S. Pat. No. 6,447,796 and US Patent Application Publication No. US 2002130430), biodegradable nanocapsules, and bioadhesive microspheres, or by proteinaceous vectors (O'Hare and Normand, International PCT Publication No. WO 00/53722). In another embodiment, the nucleic acid molecules of the invention can also be formulated or complexed with polyethyleneimine and derivatives thereof, such as polyethyleneimine-polyethyleneglycol-N-acetylgalactosamine (PEI-PEG-GAL) or polyethyleneimine-polyethyleneglycol-tri-N-acetylgalactosamine (PEI-PEG-triGAL) derivatives. Alternatively, the nucleic acid/vehicle combination is locally delivered by direct injection or by use of an infusion pump.

[0310] In one embodiment, the nucleic acid molecules or the invention are administered via pulmonary delivery, such as by inhalation of an aerosol or spray dried formulation administered by an inhalation device or nebulizer, providing rapid local uptake of the nucleic acid molecules into relevant pulmonary tissues. Solid particulate compositions containing respirable dry particles of micronized nucleic acid compositions can be prepared by grinding dried or lyophilized nucleic acid compositions, and then passing the micronized composition through, for example, a 400 mesh screen to break up or separate out large agglomerates. A solid particulate composition comprising the nucleic acid compositions of the invention can optionally contain a dispersant which serves to facilitate the formation of an aerosol as well as other therapeutic compounds. A suitable dispersant is lactose, which can be blended with the nucleic acid compound in any suitable ratio, such as a 1 to 1 ratio by weight.

[0311] Aerosols of liquid particles comprising a nucleic acid composition of the invention can be produced by any suitable means, such as with a nebulizer (see for example U.S. Pat. No. 4,501,729). Nebulizers are commercially available devices which transform solutions or suspensions of an active ingredient into a therapeutic aerosol mist either by means of acceleration of a compressed gas, typically air or oxygen, through a narrow venturi orifice or by means of ultrasonic agitation. Suitable formulations for use in nebulizers comprise the active ingredient in a liquid carrier in an amount of up to 40% w/w preferably less than 20% w/w of the formulation. The carrier is typically water or a dilute aqueous alcoholic solution, preferably made isotonic with body fluids by the addition of, for example, sodium chloride or other suitable salts. Optional additives include preservatives if the formulation is not prepared sterile, for example, methyl hydroxybenzoate, anti-oxidants, flavorings, volatile oils, buffering agents and emulsifiers and other formulation surfactants. The aerosols of solid particles comprising the active composition and surfactant can likewise be produced with any solid particulate aerosol generator. Aerosol generators for administering solid particulate therapeutics to a subject produce particles which are respirable, as explained above, and generate a volume of aerosol containing a predetermined metered dose of a therapeutic composition at a rate suitable for human administration. One illustrative type of solid particulate aerosol generator is an insufflator. Suitable formulations for administration by insufflation include finely comminuted powders which can be delivered by means of an insufflator. In the insufflator, the powder, e.g., a metered dose thereof effective to carry out the treatments described herein, is contained in capsules or cartridges, typically made of gelatin or plastic, which are either pierced or opened in situ and the powder delivered by air drawn through the device upon inhalation or by means of a manually-operated pump. The powder employed in the insufflator consists either solely of the active ingredient or of a powder blend comprising the active ingredient, a suitable powder diluent, such as lactose, and an optional surfactant. The active ingredient typically comprises from 0.1 to 100 w/w of the formulation. A second type of illustrative aerosol generator comprises a metered dose inhaler. Metered dose inhalers are pressurized aerosol dispensers, typically containing a suspension or solution formulation of the active ingredient in a liquefied propellant. During use these devices discharge the formulation through a valve adapted to deliver a metered volume to produce a fine particle spray containing the active ingredient. Suitable propellants include certain chlorofluorocarbon compounds, for example, dichlorodifluoromethane, trichlorofluoromethane, dichlorotetrafluoroethane and mixtures thereof. The formulation can additionally contain one or more co-solvents, for example, ethanol, emulsifiers and other formulation surfactants, such as oleic acid or sorbitan trioleate, anti-oxidants and suitable flavoring agents. Other methods for pulmonary delivery are described in, for example US Patent Application No. 20040037780, and U.S. Pat. Nos. 6,592,904; 6,582,728; 6,565,885.

[0312] In one embodiment, an siNA molecule of the invention is complexed with membrane disruptive agents such as those described in U.S. Patent Application Publication No. 20010007666, incorporated by reference herein in its entirety including the drawings. In another embodiment, the membrane disruptive agent or agents and the siNA molecule are also complexed with a cationic lipid or helper lipid molecule, such as those lipids described in U.S. Pat. No. 6,235,310, incorporated by reference herein in its entirety including the drawings.

[0313] Thus, the invention features a pharmaceutical composition comprising one or more nucleic acid(s) of the invention in an acceptable carrier, such as a stabilizer, buffer, and the like. The polynucleotides of the invention can be administered (e.g., RNA, DNA or protein) and introduced into a subject by any standard means, with or without stabilizers, buffers, and the like, to form a pharmaceutical composition. When it is desired to use a liposome delivery mechanism, standard protocols for formation of liposomes can be followed. The compositions of the present invention can also be formulated and used as tablets, capsules or elixirs for oral administration, suppositories for rectal administration, sterile solutions, suspensions for injectable administration, and the other compositions known in the art.

[0314] The present invention also includes pharmaceutically acceptable formulations of the compounds described. These formulations include salts of the above compounds, e.g., acid addition salts, for example, salts of hydrochloric, hydrobromic, acetic acid, and benzene sulfonic acid.

[0315] A pharmacological composition or formulation refers to a composition or formulation in a form suitable for administration, e.g., systemic administration, into a cell or subject, including for example a human. Suitable forms, in part, depend upon the use or the route of entry, for example oral, transdermal, or by injection. Such forms should not prevent the composition or formulation from reaching a target cell (i.e., a cell to which the negatively charged nucleic acid is desirable for delivery). For example, pharmacological compositions injected into the blood stream should be soluble. Other factors are known in the art, and include considerations such as toxicity and forms that prevent the composition or formulation from exerting its effect.

[0316] By “systemic administration” is meant in vivo systemic absorption or accumulation of drugs in the blood stream followed by distribution throughout the entire body. Administration routes that lead to systemic absorption include, without limitation: intravenous, subcutaneous, intraperitoneal, inhalation, oral, intrapulmonary and intramuscular. Each of these administration routes exposes the siNA molecules of the invention to an accessible diseased tissue. The rate of entry of a drug into the circulation has been shown to be a function of molecular weight or size. The use of a liposome or other drug carrier comprising the compounds of the instant invention can potentially localize the drug, for example, in certain tissue types, such as the tissues of the reticular endothelial system (RES). A liposome formulation that can facilitate the association of drug with the surface of cells, such as, lymphocytes and macrophages is also useful. This approach can provide enhanced delivery of the drug to target cells by taking advantage of the specificity of macrophage and lymphocyte immune recognition of abnormal cells, such as cells producing excess repeat expansion genes.

[0317] By “pharmaceutically acceptable formulation” is meant, a composition or formulation that allows for the effective distribution of the nucleic acid molecules of the instant invention in the physical location most suitable for their desired activity. Non-limiting examples of agents suitable for formulation with the nucleic acid molecules of the instant invention include: P-glycoprotein inhibitors (such as Pluronic P85); biodegradable polymers, such as poly (DL-lactide-coglycolide) microspheres for sustained release delivery (Emerich, D F et al, 1999, Cell Transplant, 8, 47-58); and loaded nanoparticles, such as those made of polybutylcyanoacrylate. Other non-limiting examples of delivery strategies for the nucleic acid molecules of the instant invention include material described in Boado et al., 1998, J. Pharm. Sci., 87, 1308-1315; Tyler et al., 1999, FEBS Lett., 421, 280-284; Pardridge et al., 1995, PNAS USA., 92, 5592-5596; Boado, 1995, Adv. Drug Delivery Rev., 15, 73-107; Aldrian-Herrada et al., 1998, Nucleic Acids Res., 26, 4910-4916; and Tyler et al., 1999, PNAS USA., 96, 7053-7058.

[0318] The invention also features the use of the composition comprising surface-modified liposomes containing poly (ethylene glycol) lipids (PEG-modified, or long-circulating liposomes or stealth liposomes). These formulations offer a method for increasing the accumulation of drugs in target tissues. This class of drug carriers resists opsonization and elimination by the mononuclear phagocytic system (MPS or RES), thereby enabling longer blood circulation times and enhanced tissue exposure for the encapsulated drug (Lasic et al. Chem. Rev. 1995, 95, 2601-2627; Ishiwata et al., Chem. Pharm. Bull. 1995, 43, 1005-1011). Such liposomes have been shown to accumulate selectively in tumors, presumably by extravasation and capture in the neovascularized target tissues (Lasic et al., Science 1995, 267, 1275-1276; Oku et al., 1995, Biochim. Biophys. Acta, 1238, 86-90). The long-circulating liposomes enhance the pharmacokinetics and pharmacodynamics of DNA and RNA, particularly compared to conventional cationic liposomes which are known to accumulate in tissues of the MPS (Liu et al., J. Biol. Chem. 1995, 42, 24864-24870; Choi et al., International PCT Publication No. WO 96/10391; Ansell et al., International PCT Publication No. WO 96/10390; Holland et al., International PCT Publication No. WO 96/10392). Long-circulating liposomes are also likely to protect drugs from nuclease degradation to a greater extent compared to cationic liposomes, based on their ability to avoid accumulation in metabolically aggressive MPS tissues such as the liver and spleen.

[0319] The present invention also includes compositions prepared for storage or administration that include a pharmaceutically effective amount of the desired compounds in a pharmaceutically acceptable carrier or diluent. Acceptable carriers or diluents for therapeutic use are well known in the pharmaceutical art, and are described, for example, in Remington's Pharmaceutical Sciences, Mack Publishing Co. (A.R. Gennaro edit. 1985), hereby incorporated by reference herein. For example, preservatives, stabilizers, dyes and flavoring agents can be provided. These include sodium benzoate, sorbic acid and esters of p-hydroxybenzoic acid. In addition, antioxidants and suspending agents can be used.

[0320] A pharmaceutically effective dose is that dose required to prevent, inhibit the occurrence, or treat (alleviate a symptom to some extent, preferably all of the symptoms) of a disease state. The pharmaceutically effective dose depends on the type of disease, the composition used, the route of administration, the type of mammal being treated, the physical characteristics of the specific mammal under consideration, concurrent medication, and other factors that those skilled in the medical arts will recognize. Generally, an amount between 0.1 mg/kg and 100 mg/kg body weight/day of active ingredients is administered dependent upon potency of the negatively charged polymer.

[0321] The nucleic acid molecules of the invention and formulations thereof can be administered orally, topically, parenterally, by inhalation or spray, or rectally in dosage unit formulations containing conventional non-toxic pharmaceutically acceptable carriers, adjuvants and/or vehicles. The term parenteral as used herein includes percutaneous, subcutaneous, intravascular (e.g., intravenous), intramuscular, or intrathecal injection or infusion techniques and the like. In addition, there is provided a pharmaceutical formulation comprising a nucleic acid molecule of the invention and a pharmaceutically acceptable carrier. One or more nucleic acid molecules of the invention can be present in association with one or more non-toxic pharmaceutically acceptable carriers and/or diluents and/or adjuvants, and if desired other active ingredients. The pharmaceutical compositions containing nucleic acid molecules of the invention can be in a form suitable for oral use, for example, as tablets, troches, lozenges, aqueous or oily suspensions, dispersible powders or granules, emulsion, hard or soft capsules, or syrups or elixirs.

[0322] Compositions intended for oral use can be prepared according to any method known to the art for the manufacture of pharmaceutical compositions and such compositions can contain one or more such sweetening agents, flavoring agents, coloring agents or preservative agents in order to provide pharmaceutically elegant and palatable preparations. Tablets contain the active ingredient in admixture with non-toxic pharmaceutically acceptable excipients that are suitable for the manufacture of tablets. These excipients can be, for example, inert diluents; such as calcium carbonate, sodium carbonate, lactose, calcium phosphate or sodium phosphate; granulating and disintegrating agents, for example, corn starch, or alginic acid; binding agents, for example starch, gelatin or acacia; and lubricating agents, for example magnesium stearate, stearic acid or talc. The tablets can be uncoated or they can be coated by known techniques. In some cases such coatings can be prepared by known techniques to delay disintegration and absorption in the gastrointestinal tract and thereby provide a sustained action over a longer period. For example, a time delay material such as glyceryl monosterate or glyceryl distearate can be employed.

[0323] Formulations for oral use can also be presented as hard gelatin capsules wherein the active ingredient is mixed with an inert solid diluent, for example, calcium carbonate, calcium phosphate or kaolin, or as soft gelatin capsules wherein the active ingredient is mixed with water or an oil medium, for example peanut oil, liquid paraffin or olive oil.

[0324] Aqueous suspensions contain the active materials in a mixture with excipients suitable for the manufacture of aqueous suspensions. Such excipients are suspending agents, for example sodium carboxymethylcellulose, methylcellulose, hydropropyl-methylcellulose, sodium alginate, polyvinylpyrrolidone, gum tragacanth and gum acacia; dispersing or wetting agents can be a naturally-occurring phosphatide, for example, lecithin, or condensation products of an alkylene oxide with fatty acids, for example polyoxyethylene stearate, or condensation products of ethylene oxide with long chain aliphatic alcohols, for example heptadecaethyleneoxycetanol, or condensation products of ethylene oxide with partial esters derived from fatty acids and a hexitol such as polyoxyethylene sorbitol monooleate, or condensation products of ethylene oxide with partial esters derived from fatty acids and hexitol anhydrides, for example polyethylene sorbitan monooleate. The aqueous suspensions can also contain one or more preservatives, for example ethyl, or n-propyl p-hydroxybenzoate, one or more coloring agents, one or more flavoring agents, and one or more sweetening agents, such as sucrose or saccharin.

[0325] Oily suspensions can be formulated by suspending the active ingredients in a vegetable oil, for example arachis oil, olive oil, sesame oil or coconut oil, or in a mineral oil such as liquid paraffin. The oily suspensions can contain a thickening agent, for example beeswax, hard paraffin or cetyl alcohol. Sweetening agents and flavoring agents can be added to provide palatable oral preparations. These compositions can be preserved by the addition of an anti-oxidant such as ascorbic acid

[0326] Dispersible powders and granules suitable for preparation of an aqueous suspension by the addition of water provide the active ingredient in admixture with a dispersing or wetting agent, suspending agent and one or more preservatives. Suitable dispersing or wetting agents or suspending agents are exemplified by those already mentioned above. Additional excipients, for example sweetening, flavoring and coloring agents, can also be present.

[0327] Pharmaceutical compositions of the invention can also be in the form of oil-in-water emulsions. The oily phase can be a vegetable oil or a mineral oil or mixtures of these. Suitable emulsifying agents can be naturally-occurring gums, for example gum acacia or gum tragacanth, naturally-occurring phosphatides, for example soy bean, lecithin, and esters or partial esters derived from fatty acids and hexitol, anhydrides, for example sorbitan monooleate, and condensation products of the said partial esters with ethylene oxide, for example polyoxyethylene sorbitan monooleate. The emulsions can also contain sweetening and flavoring agents.

[0328] Syrups and elixirs can be formulated with sweetening agents, for example glycerol, propylene glycol, sorbitol, glucose or sucrose. Such formulations can also contain a demulcent, a preservative and flavoring and coloring agents. The pharmaceutical compositions can be in the form of a sterile injectable aqueous or oleaginous suspension. This suspension can be formulated according to the known art using those suitable dispersing or wetting agents and suspending agents that have been mentioned above. The sterile injectable preparation can also be a sterile injectable solution or suspension in a non-toxic parentally acceptable diluent or solvent, for example as a solution in 1,3-butanediol. Among the acceptable vehicles and solvents that can be employed are water, Ringer's solution and isotonic sodium chloride solution. In addition, sterile, fixed oils are conventionally employed as a solvent or suspending medium. For this purpose, any bland fixed oil can be employed including synthetic mono- or diglycerides. In addition, fatty acids such as oleic acid find use in the preparation of injectables.

[0329] The nucleic acid molecules of the invention can also be administered in the form of suppositories, e.g., for rectal administration of the drug. These compositions can be prepared by mixing the drug with a suitable non-irritating excipient that is solid at ordinary temperatures but liquid at the rectal temperature and will therefore melt in the rectum to release the drug. Such materials include cocoa butter and polyethylene glycols.

[0330] Nucleic acid molecules of the invention can be administered parenterally in a sterile medium. The drug, depending on the vehicle and concentration used, can either be suspended or dissolved in the vehicle. Advantageously, adjuvants such as local anesthetics, preservatives and buffering agents can be dissolved in the vehicle.

[0331] Dosage levels of the order of from about 0.1 mg to about 140 mg per kilogram of body weight per day are useful in the treatment of the above-indicated conditions (about 0.5 mg to about 7 g per subject per day). The amount of active ingredient that can be combined with the carrier materials to produce a single dosage form varies depending upon the host treated and the particular mode of administration. Dosage unit forms generally contain between from about 1 mg to about 500 mg of an active ingredient.

[0332] It is understood that the specific dose level for any particular subject depends upon a variety of factors including the activity of the specific compound employed, the age, body weight, general health, sex, diet, time of administration, route of administration, and rate of excretion, drug combination and the severity of the particular disease undergoing therapy.

[0333] For administration to non-human animals, the composition can also be added to the animal feed or drinking water. It can be convenient to formulate the animal feed and drinking water compositions so that the animal takes in a therapeutically appropriate quantity of the composition along with its diet. It can also be convenient to present the composition as a premix for addition to the feed or drinking water.

[0334] The nucleic acid molecules of the present invention can also be administered to a subject in combination with other therapeutic compounds to increase the overall therapeutic effect. The use of multiple compounds to treat an indication can increase the beneficial effects while reducing the presence of side effects.

[0335] In one embodiment, the invention comprises compositions suitable for administering nucleic acid molecules of the invention to specific cell types. For example, the asialoglycoprotein receptor (ASGPr) (Wu and Wu, 1987, J. Biol. Chem. 262, 4429-4432) is unique to hepatocytes and binds branched galactose-terminal glycoproteins, such as asialoorosomucoid (ASOR). In another example, the folate receptor is overexpressed in many cancer cells. Binding of such glycoproteins, synthetic glycoconjugates, or folates to the receptor takes place with an affinity that strongly depends on the degree of branching of the oligosaccharide chain, for example, triatennary structures are bound with greater affinity than biatennary or monoatennary chains (Baenziger and Fiete, 1980, Cell, 22, 611-620; Connolly et al., 1982, J. Biol. Chem., 257, 939-945). Lee and Lee, 1987, Glycoconjugate J., 4, 317-328, obtained this high specificity through the use of N-acetyl-D-galactosamine as the carbohydrate moiety, which has higher affinity for the receptor, compared to galactose. This “clustering effect” has also been described for the binding and uptake of mannosyl-terminating glycoproteins or glycoconjugates (Ponpipom et al., 1981, J. Med. Chem., 24, 1388-1395). The use of galactose, galactosamine, or folate based conjugates to transport exogenous compounds across cell membranes can provide a targeted delivery approach to, for example, the treatment of liver disease, cancers of the liver, or other cancers. The use of bioconjugates can also provide a reduction in the required dose of therapeutic compounds required for treatment. Furthermore, therapeutic bioavailability, pharmacodynamics, and pharmacokinetic parameters can be modulated through the use of nucleic acid bioconjugates of the invention. Non-limiting examples of such bioconjugates are described in Vargeese et al., U.S. Ser. No. 10/201,394, filed Aug. 13, 2001; and Matulic-Adamic et al., U.S. Ser. No. 10/151,116, filed May 17, 2002. In one embodiment, nucleic acid molecules of the invention are complexed with or covalently attached to nanoparticles, such as Hepatitis B virus S, M, or L envelope proteins (see for example Yamado et al., 2003, Nature Biotechnology, 21, 885). In one embodiment, nucleic acid molecules of the invention are delivered with specificity for human tumor cells, specifically non-apoptotic human tumor cells including for example T-cells, hepatocytes, breast carcinoma cells, ovarian carcinoma cells, melanoma cells, intestinal epithelial cells, prostate cells, testicular cells, non-small cell lung cancers, small cell lung cancers, etc.

[0336] Alternatively, certain siNA molecules of the instant invention can be expressed within cells from eukaryotic promoters (e.g., Izant and Weintraub, 1985, Science, 229, 345; McGarry and Lindquist, 1986, Proc. Natl. Acad. Sci., USA 83, 399; Scanlon et al., 1991, Proc. Natl. Acad. Sci. USA, 88, 10591-5; Kashani-Sabet et al., 1992, Antisense Res. Dev., 2, 3-15; Dropulic et al., 1992, J. Virol., 66, 1432-41; Weerasinghe et al., 1991, J. Virol., 65, 5531-4; Ojwang et al., 1992, Proc. Natl. Acad. Sci. USA, 89, 10802-6; Chen et al., 1992, Nucleic Acids Res., 20, 4581-9; Sarver et al., 1990 Science, 247, 1222-1225; Thompson et al., 1995, Nucleic Acids Res., 23, 2259; Good et al., 1997, Gene Therapy, 4, 45. Those skilled in the art realize that any nucleic acid can be expressed in eukaryotic cells from the appropriate DNA/RNA vector. The activity of such nucleic acids can be augmented by their release from the primary transcript by a enzymatic nucleic acid (Draper et al., PCT WO 93/23569, and Sullivan et al., PCT WO 94/02595; Ohkawa et al., 1992, Nucleic Acids Symp. Ser., 27, 15-6; Taira et al., 1991, Nucleic Acids Res., 19, 5125-30; Ventura et al., 1993, Nucleic Acids Res., 21, 3249-55; Chowrira et al., 1994, J. Biol. Chem., 269, 25856.

[0337] In another aspect of the invention, RNA molecules of the present invention can be expressed from transcription units (see for example Couture et al., 1996, TIG., 12, 510) inserted into DNA or RNA vectors. The recombinant vectors can be DNA plasmids or viral vectors. siNA expressing viral vectors can be constructed based on, but not limited to, adeno-associated virus, retrovirus, adenovirus, or alphavirus. In another embodiment, pol III based constructs are used to express nucleic acid molecules of the invention (see for example Thompson, U.S. Pats. Nos. 5,902,880 and 6,146,886). The recombinant vectors capable of expressing the siNA molecules can be delivered as described above, and persist in target cells. Alternatively, viral vectors can be used that provide for transient expression of nucleic acid molecules. Such vectors can be repeatedly administered as necessary. Once expressed, the siNA molecule interacts with the target mRNA and generates an RNAi response. Delivery of siNA molecule expressing vectors can be systemic, such as by intravenous or intra-muscular administration, by administration to target cells ex-planted from a subject followed by reintroduction into the subject, or by any other means that would allow for introduction into the desired target cell (for a review see Couture et al., 1996, TIG., 12, 510).

[0338] In one aspect the invention features an expression vector comprising a nucleic acid sequence encoding at least one siNA molecule of the instant invention. The expression vector can encode one or both strands of an siNA duplex, or a single self-complementary strand that self hybridizes into an siNA duplex. The nucleic acid sequences encoding the siNA molecules of the instant invention can be operably linked in a manner that allows expression of the siNA molecule (see for example Paul et al., 2002, Nature Biotechnology, 19, 505; Miyagishi and Taira, 2002, Nature Biotechnology, 19, 497; Lee et al., 2002, Nature Biotechnology, 19, 500; and Novina et al., 2002, Nature Medicine, advance online publication doi: 10.1038/nm725).

[0339] In another aspect, the invention features an expression vector comprising: a) a transcription initiation region (e.g., eukaryotic pol I, II or III initiation region); b) a transcription termination region (e.g., eukaryotic pol I, II or III termination region); and c) a nucleic acid sequence encoding at least one of the siNA molecules of the instant invention, wherein said sequence is operably linked to said initiation region and said termination region in a manner that allows expression and/or delivery of the siNA molecule. The vector can optionally include an open reading frame (ORF) for a protein operably linked on the 5′ side or the 3′-side of the sequence encoding the siNA of the invention; and/or an intron (intervening sequences).

[0340] Transcription of the siNA molecule sequences can be driven from a promoter for eukaryotic RNA polymerase I (pol I), RNA polymerase II (pol II), or RNA polymerase III (pol II). Transcripts from pol II or pol III promoters are expressed at high levels in all cells; the levels of a given pol II promoter in a given cell type depends on the nature of the gene regulatory sequences. (enhancers, silencers, etc.) present nearby. Prokaryotic RNA polymerase promoters are also used, providing that the prokaryotic RNA polymerase enzyme is expressed in the appropriate cells (Elroy-Stein and Moss, 1990, Proc. Natl. Acad. Sci. U S A, 87, 6743-7; Gao and Huang 1993, Nucleic Acids Res., 21, 2867-72; Lieber et al., 1993, Methods Enzymol., 217, 47-66; Zhou et al., 1990, Mol. Cell. Biol., 10, 4529-37). Several investigators have demonstrated that nucleic acid molecules expressed from such promoters can function in mammalian cells (e.g. Kashani-Sabet et al., 1992, Antisense Res. Dev., 2, 3-15; Ojwang et al., 1992, Proc. Natl. Acad. Sci. USA, 89, 10802-6; Chen et al., 1992, Nucleic Acids Res., 20, 4581-9; Yu et al., 1993, Proc. Natl. Acad. Sci. USA, 90, 6340-4; L'Huillier et al., 1992, EMBO J., 11, 4411-8; Lisziewicz et al., 1993, Proc. Natl. Acad. Sci. U.S. A, 90, 8000-4; Thompson et al., 1995, Nucleic Acids Res., 23, 2259; Sullenger & Cech, 1993, Science, 262, 1566). More specifically, transcription units such as the ones derived from genes encoding U6 small nuclear (snRNA), transfer RNA (tRNA) and adenovirus VA RNA are useful in generating high concentrations of desired RNA molecules such as siNA in cells (Thompson et al., supra; Couture and Stinchcomb, 1996, supra; Noonberg et al., 1994, Nucleic Acid Res., 22, 2830; Noonberg et al., U.S. Pat. No. 5,624,803; Good et al., 1997, Gene Ther., 4, 45; Beigelman et al., International PCT Publication No. WO 96/18736. The above siNA transcription units can be incorporated into a variety of vectors for introduction into mammalian cells, including but not restricted to, plasmid DNA vectors, viral DNA vectors (such as adenovirus or adeno-associated virus vectors), or viral RNA vectors (such as retroviral or alphavirus vectors) (for a review see Couture and Stinchcomb, 1996, supra).

[0341] In another aspect the invention features an expression vector comprising a nucleic acid sequence encoding at least one of the siNA molecules of the invention in a manner that allows expression of that siNA molecule. The expression vector comprises in one embodiment; a) a transcription initiation region; b) a transcription termination region; and c) a nucleic acid sequence encoding at least one strand of the siNA molecule, wherein the sequence is operably linked to the initiation region and the termination region in a manner that allows expression and/or delivery of the siNA molecule.

[0342] In another embodiment the expression vector comprises: a) a transcription initiation region; b) a transcription termination region; c) an open reading frame; and d) a nucleic acid sequence encoding at least one strand of an siNA molecule, wherein the sequence is operably linked to the 3′-end of the open reading frame and wherein the sequence is operably linked to the initiation region, the open reading frame and the termination region in a manner that allows expression and/or delivery of the siNA molecule. In yet another embodiment, the expression vector comprises: a) a transcription initiation region; b) a transcription termination region; c) an intron; and d) a nucleic acid sequence encoding at least one siNA molecule, wherein the sequence is operably linked to the initiation region, the intron and the termination region in a manner which allows expression and/or delivery of the nucleic acid molecule.

[0343] In another embodiment, the expression vector comprises: a) a transcription initiation region; b) a transcription termination region; c) an intron; d) an open reading frame; and e) a nucleic acid sequence encoding at least one strand of an siNA molecule, wherein the sequence is operably linked to the 3′-end of the open reading frame and wherein the sequence is operably linked to the initiation region, the intron, the open reading frame and the termination region in a manner which allows expression and/or delivery of the siNA molecule.

### SARS Virus Biology and Biochemistry

[0344] The following discussion is adapted from the report, “Preliminary Clinical Description of Severe Acute Respiratory Syndrome”, World Health Organization, Geneva, Switzerland, available at the Centers for Disease Control and Prevention website.

[0345] Severe acute respiratory syndrome (SARS) is a viral respiratory illness caused by a coronavirus, called SARS-associated coronavirus (SARS-CoV). SARS was first reported in Asia in February 2003. Over the next few months, the illness spread to more than two dozen countries in North America, South America, Europe, and Asia before the SARS global outbreak of 2003 was contained. According to the World Health Organization (WHO), a total of 8,098 people worldwide became sick with SARS during the 2003 outbreak. Of these, 774 died.

[0346] The incubation period for SARS is typically 2-7 days; however, isolated reports have suggested an incubation period as long as 10 days. The illness begins generally with a prodrome of fever (>100.4° F. [>38.0° C.]). Fever often is high, sometimes is associated with chills and rigors, and might be accompanied by other symptoms, including headache, malaise, and myalgia. At the onset of illness, some persons have mild respiratory symptoms. Typically, rash and neurologic or gastrointestinal findings are absent; however, some patients have reported diarrhea during the febrile prodrome.

[0347] After 3-7 days, a lower respiratory phase begins with the onset of a dry, nonproductive cough or dyspnea, which might be accompanied by or progress to hypoxemia. In 10%-20% of cases, the respiratory illness is severe enough to require intubation and mechanical ventilation. Death may result from progressive respiratory failure due to alveolar damage. The case-fatality rate among persons with illness meeting the current WHO case definition of SARS is approximately 3%.

[0348] Chest radiographs might be normal during the febrile prodrome and throughout the course of illness. However, in a substantial proportion of patients, the respiratory phase is characterized by early focal interstitial infiltrates progressing to more generalized, patchy, interstitial infiltrates. Some chest radiographs from patients in the late stages of SARS also have shown areas of consolidation.

[0349] Early in the course of disease, the absolute lymphocyte count is often decreased. Overall white blood cell counts have generally been normal or decreased. At the peak of the respiratory illness, approximately 50% of patients have leukopenia and thrombocytopenia or low-normal platelet counts (50,000-150,000/μL). Early in the respiratory phase, elevated creatine phosphokinase levels (as high as 3,000 IU/L) and hepatic transaminases (two to six times the upper limits of normal) have been noted. In the majority of patients, renal function has remained normal.

[0350] The severity of illness might be highly variable, ranging from mild illness to death. Although a few close contacts of patients with SARS have developed a similar illness, the majority have remained well. Some close contacts have reported a mild, febrile illness without respiratory signs or symptoms, suggesting the illness might not always progress to the respiratory phase.

[0351] Treatment regimens have included several antibiotics to presumptively treat known bacterial agents of atypical pneumonia. In several locations, therapy also has included antiviral agents such as oseltamivir or ribavirin. Steroids have also been administered orally or intravenously to patients in combination with ribavirin and other antimicrobials. At present, the most efficacious treatment regimen, if any, is unknown.

[0352] The causative agent of SARS appears to be a novel coronavirus that was isolated from patients who met the case definition of SARS (see Ksiazek et al., 2003, New England Journal of Medicine, 10.1056/NEJMoa030781. Indirect fluorescent antibody tests and enzyme-linked immunosorbent assays made with the new coronavirus isolate have been used to demonstrate a virus-specific serologic response. Amplification of short regions of the polymerase gene, (the most strongly conserved part of the Coronavirus genome) by reverse transcriptase polymerase chain reaction (RT-PCR) and nucleotide sequencing revealed that the SARS virus is a novel Coronavirus which has not previously been present in human populations. This conclusion is confirmed by serological (antigenic) investigations. The sequence of the SARS associated coronavirus was recently made available through the CDC.

[0353] Viral entry into cells occurs via endocytosis and membrane fusion. Replication occurs in the cytoplasm. Initially, the 5′ 20 kb of the (+)sense genome is translated to produce a viral polymerase, which then produces a full-length (−)sense strand. This is used as a template to produce mRNA as a nested set of transcripts, all with an identical 5′ non-translated leader sequence of 72 nt and coincident 3′ polyadenylated ends. Each mRNA is monocistronic, the genes at the 5′ end being translated from the longest mRNA. These unusual cytoplasmic structures are produced not by splicing but by the polymerase during transcription. Between each of the genes there is a repeated intergenic sequence—UCUAAAC—which interacts with the transcriptase plus cellular factors to splice the leader sequence onto the start of each ORF. Viral assembly occurs by budding into the golgi apparatus, and viral particles are transported to the surface of the cell and are subsequently released.

[0354] The SARS virus can be grown in Vero cells (a fibroblast cell line isolated in 1962 from a primate). This is a novel property for human cornaviruses which usually cannot be cultivated. In these cells, virus infection results in a cytopathic effect, and budding of Coronavirus-like particles from the endoplasmic reticulum within infected cells.

[0355] Detection of the SARS virus can be accomplished with serological testing and molecular diagnostic procedures. Serological testing for anti-Coronavirus antibodies consists of indirect fluorescent antibody testing and enzyme-linked immunosorbent assays (ELISA) which detect antibodies against the virus produced in response to infection. Molecular testing consists of reverse transcriptase-polymerase chain reaction (RT-PCR) tests specific for the RNA from the novel Coronavirus.

[0356] The use of small interfering nucleic acid molecules targeting SARS genes therefore provides a class of novel therapeutic agents that can be used in the treatment and diagnosis of SARS virus infection, acute respiratory failure, viral pneumonia, or any other disease or condition that responds to modulation of SARS genes.

### EXAMPLES

[0357] The following are non-limiting examples showing the selection, isolation, synthesis and activity of nucleic acids of the instant invention.

### Example 1

### Tandem Synthesis of siNA Constructs

[0358] Exemplary siNA molecules of the invention are synthesized in tandem using a cleavable linker, for example, a succinyl-based linker. Tandem synthesis as described herein is followed by a one-step purification process that provides RNAi molecules in high yield. This approach is highly amenable to siNA synthesis in support of high throughput RNAi screening, and can be readily adapted to multi-column or multi-well synthesis platforms.

[0359] After completing a tandem synthesis of an siNA oligo and its complement in which the 5′-terminal dimethoxytrityl (5′-O-DMT) group remains intact (trityl on synthesis), the oligonucleotides are deprotected as described above. Following deprotection, the siNA sequence strands are allowed to spontaneously hybridize. This hybridization yields a duplex in which one strand has retained the 5′-O-DMT group while the complementary strand comprises a terminal 5′-hydroxyl. The newly formed duplex behaves as a single molecule during routine solid-phase extraction purification (Trityl-On purification) even though only one molecule has a dimethoxytrityl group. Because the strands form a stable duplex, this dimethoxytrityl group (or an equivalent group, such as other trityl groups or other hydrophobic moieties) is all that is required to purify the pair of oligos, for example, by using a C18 cartridge.

[0360] Standard phosphoramidite synthesis chemistry is used up to the point of introducing a tandem linker, such as an inverted deoxy abasic succinate or glyceryl succinate linker (see FIG. 1) or an equivalent cleavable linker. A non-limiting example of linker coupling conditions that can be used includes a hindered base such as diisopropylethylamine (DIPA) and/or DMAP in the presence of an activator reagent such as Bromotripyrrolidinophosphoniumhexafluororophosphate (PyBrOP). After the linker is coupled, standard synthesis chemistry is utilized to complete synthesis of the second sequence leaving the terminal the 5′-O-DMT intact. Following synthesis, the resulting oligonucleotide is deprotected according to the procedures described herein and quenched with a suitable buffer, for example with 50 mM NaOAc or 1.5M NH₄H₂CO₃.

[0361] Purification of the siNA duplex can be readily accomplished using solid phase extraction, for example using a Waters C18 SepPak Ig cartridge conditioned with 1 column volume (CV) of acetonitrile, 2 CV H2O, and 2 CV 50 mM NaOAc. The sample is loaded and then washed with 1 CV H₂O or 50 mM NaOAc. Failure sequences are eluted with 1 CV 14% ACN (Aqueous with 50 mM NaOAc and 50 mM NaCl). The column is then washed, for example with 1 CV H2O followed by on-column detritylation, for example by passing I CV of 1% aqueous trifluoroacetic acid (TFA) over the column, then adding a second CV of 1% aqueous TFA to the column and allowing to stand for approximately 10 minutes. The remaining TFA solution is removed and the column washed with H₂O followed by 1 CV 1M NaCl and additional H₂O. The siNA duplex product is then eluted, for example, using 1 CV 20% aqueous CAN.

[0362] FIG. 2 provides an example of MALDI-TOF mass spectrometry analysis of a purified siNA construct in which each peak corresponds to the calculated mass of an individual siNA strand of the siNA duplex. The same purified siNA provides three peaks when analyzed by capillary gel electrophoresis (CGE), one peak presumably corresponding to the duplex siNA, and two peaks presumably corresponding to the separate siNA sequence strands. Ion exchange HPLC analysis of the same siNA contract only shows a single peak. Testing of the purified siNA construct using a luciferase reporter assay described below demonstrated the same RNAi activity compared to siNA constructs generated from separately synthesized oligonucleotide sequence strands.

### Example 2

### Identification of Potential siNA Target Sites in any RNA Sequence

[0363] The sequence of an RNA target of interest, such as a viral or human mRNA transcript, is screened for target sites, for example by using a computer folding algorithm. In a non-limiting example, the sequence of a gene or RNA gene transcript derived from a database, such as Genbank, is used to generate siNA targets having complementarity to the target. Such sequences can be obtained from a database, or can be determined experimentally as known in the art. Target sites that are known, for example, those target sites determined to be effective target sites based on studies with other nucleic acid molecules, for example ribozymes or antisense, or those targets known to be associated with a disease or condition such as those sites containing mutations or deletions, can be used to design siNA molecules targeting those sites. Various parameters can be used to determine which sites are the most suitable target sites within the target RNA sequence. These parameters include but are not limited to secondary or tertiary RNA structure, the nucleotide base composition of the target sequence, the degree of homology between various regions of the target sequence, or the relative position of the target sequence within the RNA transcript. Based on these determinations, any number of target sites within the RNA transcript can be chosen to screen siNA molecules for efficacy, for example by using in vitro RNA cleavage assays, cell culture, or animal models. In a non-limiting example, anywhere from 1 to 1000 target sites are chosen within the transcript based on the size of the siNA construct to be used. High throughput screening assays can be developed for screening siNA molecules using methods known in the art, such as with multi-well or multi-plate assays to determine efficient reduction in target gene expression.

### Example 3

### Selection of siNA Molecule Target Sites in a RNA

[0364] The following non-limiting steps can be used to carry out the selection of siNAs targeting a given gene sequence or transcript.

[0365] 1. The target sequence is parsed in silico into a list of all fragments or subsequences of a particular length, for example 23 nucleotide fragments, contained within the target sequence. This step is typically carried out using a custom Perl script, but commercial sequence analysis programs such as Oligo, MacVector, or the GCG Wisconsin Package can be employed as well.

[0366] 2. In some instances the siNAs correspond to more than one target sequence; such would be the case for example in targeting different transcripts of the same gene, targeting different transcripts of more than one gene, or for targeting both the human gene and an animal homolog. In this case, a subsequence list of a particular length is generated for each of the targets, and then the lists are compared to find matching sequences in each list. The subsequences are then ranked according to the number of target sequences that contain the given subsequence; the goal is to find subsequences that are present in most or all of the target sequences. Alternately, the ranking can identify subsequences that are unique to a target sequence, such as a mutant target sequence. Such an approach would enable the use of siNA to target specifically the mutant sequence and not effect the expression of the normal sequence.

[0367] 3. In some instances the siNA subsequences are absent in one or more sequences while present in the desired target sequence; such would be the case if the siNA targets a gene with a paralogous family member that is to remain untargeted. As in case 2 above, a subsequence list of a particular length is generated for each of the targets, and then the lists are compared to find sequences that are present in the target gene but are absent in the untargeted paralog.

[0368] 4. The ranked siNA subsequences can be further analyzed and ranked according to GC content. A preference can be given to sites containing 30-70% GC, with a further preference to sites containing 40-60% GC.

[0369] 5. The ranked siNA subsequences can be further analyzed and ranked according to self-folding and internal hairpins. Weaker internal folds are preferred; strong hairpin structures are to be avoided.

[0370] 6. The ranked siNA subsequences can be further analyzed and ranked according to whether they have runs of GGG or CCC in the sequence. GGG (or even more Gs) in either strand can make oligonucleotide synthesis problematic and can potentially interfere with RNAi activity, so it is avoided whenever better sequences are available. CCC is searched in the target strand because that will place GGG in the antisense strand.

[0371] 7. The ranked siNA subsequences can be further analyzed and ranked according to whether they have the dinucleotide UU (uridine dinucleotide) on the 3′-end of the sequence, and/or AA on the 5′-end of the sequence (to yield 3′ UU on the antisense sequence). These sequences allow one to design siNA molecules with terminal TT thymidine dinucleotides.

[0372] 8. Four or five target sites are chosen from the ranked list of subsequences as described above. For example, in subsequences having 23 nucleotides, the right 21 nucleotides of each chosen 23-mer subsequence are then designed and synthesized for the upper (sense) strand of the siNA duplex, while the reverse complement of the left 21 nucleotides of each chosen 23-mer subsequence are then designed and synthesized for the lower (antisense) strand of the siNA duplex (see Tables II and III). If terminal TT residues are desired for the sequence (as described in paragraph 7), then the two 3′ terminal nucleotides of both the sense and antisense strands are replaced by TT prior to synthesizing the oligos.

[0373] 9. The siNA molecules are screened in an in vitro, cell culture or animal model system to identify the most active siNA molecule or the most preferred target site within the target RNA sequence.

[0374] 10. Other design considerations can be used when selecting target nucleic acid sequences, see for example Reynolds et al., 2004, Nature Biotechnology Advanced Online Publication, 1 Feb. 2004, doi:10.1038/nbt936 and Ui-Tei et al., 2004, Nucleic Acids Research, 32, doi: 10.1093/nar/gkh247.

[0375] In an alternate approach, a pool of siNA constructs specific to a SARS target sequence is used to screen for target sites in cells expressing SARS RNA, such as VERO cells and/or FRhk-4 cells. The general strategy used in this approach is shown in FIG. 9. A non-limiting example of such is a pool comprising sequences having SEQ ID NOs: 1-3392. Cells expressing SARS (e.g., VERO cells and/or FRhk-4 cells) are transfected with the pool of siNA constructs and cells that demonstrate a phenotype associated with SARS inhibition are sorted. The pool of siNA constructs can be expressed from transcription cassettes inserted into appropriate vectors (see for example FIG. 7 and FIG. 8). The siNA from cells demonstrating a positive phenotypic change (e.g., decreased proliferation, decreased SARS mRNA levels or decreased SARS protein expression), are sequenced to determine the most suitable target site(s) within the target SARS RNA sequence.

### Example 4

### SARS Targeted siNA Design

[0376] siNA target sites were chosen by analyzing sequences of the SARS RNA target and optionally prioritizing the target sites on the basis of folding (structure of any given sequence analyzed to determine siNA accessibility to the target), by using a library of siNA molecules as described in Example 3, or alternately by using an in vitro siNA system as described in Example 6 herein. siNA molecules were designed that could bind each target and are optionally individually analyzed by computer folding to assess whether the siNA molecule can interact with the target sequence. Varying the length of the siNA molecules can be chosen to optimize activity. Generally, a sufficient number of complementary nucleotide bases are chosen to bind to, or otherwise interact with, the target RNA, but the degree of complementarity can be modulated to accommodate siNA duplexes or varying length or base composition. By using such methodologies, siNA molecules can be designed to target sites within any known RNA sequence, for example those RNA sequences corresponding to the any gene transcript.

[0377] Chemically modified siNA constructs are designed to provide nuclease stability for systemic administration in vivo and/or improved pharmacokinetic, localization, and delivery properties while preserving the ability to mediate RNAi activity. Chemical modifications as described herein are introduced synthetically using synthetic methods described herein and those generally known in the art. The synthetic siNA constructs are then assayed for nuclease stability in serum and/or cellular/tissue extracts (e.g. liver extracts). The synthetic siNA constructs are also tested in parallel for RNAi activity using an appropriate assay, such as a luciferase reporter assay as described herein or another suitable assay that can quantity RNAi activity. Synthetic siNA constructs that possess both nuclease stability and RNAi activity can be further modified and re-evaluated in stability and activity assays. The chemical modifications of the stabilized active siNA constructs can then be applied to any siNA sequence targeting any chosen RNA and used, for example, in target screening assays to pick lead siNA compounds for therapeutic development (see for example FIG. 11).

### Example 5

### Chemical Synthesis and Purification of siNA

[0378] siNA molecules can be designed to interact with various sites in the RNA message, for example, target sequences within the RNA sequences described herein. The sequence of one strand of the siNA molecule(s) is complementary to the target site sequences described above. The siNA molecules can be chemically synthesized using methods described herein. Inactive siNA molecules that are used as control sequences can be synthesized by scrambling the sequence of the siNA molecules such that it is not complementary to the target sequence. Generally, siNA constructs can by synthesized using solid phase oligonucleotide synthesis methods as described herein (see for example Usman et al., U.S. Pat. Nos. 5,804,683; 5,831,071; 5,998,203; 6,117,657; 6,353,098; 6,362,323; 6,437,117; 6,469,158; Scaringe et al., U.S. Pat. Nos. 6,111,086; 6,008,400; 6,111,086 all incorporated by reference herein in their entirety).

[0379] In a non-limiting example, RNA oligonucleotides are synthesized in a stepwise fashion using the phosphoramidite chemistry as is known in the art. Standard phosphoramidite chemistry involves the use of nucleosides comprising any of 5′-O-dimethoxytrityl, 2′-O-tert-butyldimethylsilyl, 3′-O-2-Cyanoethyl N,N-diisopropylphos-phoroamidite groups, and exocyclic amine protecting groups (e.g. N6-benzoyl adenosine, N4 acetyl cytidine, and N2-isobutyryl guanosine). Alternately, 2′-O—Silyl Ethers can be used in conjunction with acid-labile 2′-O-orthoester protecting groups in the synthesis of RNA as described by Scaringe supra. Differing 2′ chemistries can require different protecting groups, for example 2′-deoxy-2′-amino nucleosides can utilize N-phthaloyl protection as described by Usman et al., U.S. Pat. No. 5,631,360, incorporated by reference herein in its entirety).

[0380] During solid phase synthesis, each nucleotide is added sequentially (3′- to 5′-direction) to the solid support-bound oligonucleotide. The first nucleoside at the 3′-end of the chain is covalently attached to a solid support (e.g., controlled pore glass or polystyrene) using various linkers. The nucleotide precursor, a ribonucleoside phosphoramidite, and activator are combined resulting in the coupling of the second nucleoside phosphoramidite onto the 5′-end of the first nucleoside. The support is then washed and any unreacted 5′-hydroxyl groups are capped with a capping reagent such as acetic anhydride to yield inactive 5′-acetyl moieties. The trivalent phosphorus linkage is then oxidized to a more stable phosphate linkage. At the end of the nucleotide addition cycle, the 5′-O-protecting group is cleaved under suitable conditions (e.g., acidic conditions for trityl-based groups and Fluoride for silyl-based groups). The cycle is repeated for each subsequent nucleotide.

[0381] Modification of synthesis conditions can be used to optimize coupling efficiency, for example by using differing coupling times, differing reagent/phosphoramidite concentrations, differing contact times, differing solid supports and solid support linker chemistries depending on the particular chemical composition of the siNA to be synthesized. Deprotection and purification of the siNA can be performed as is generally described in Deprotection and purification of the siNA can be performed as is generally described in Usman et al., U.S. Pat. No. 5,831,071, U.S. Pat. No. 6,353,098, U.S. Pat. No. 6,437,117, and Bellon et al., U.S. Pat. No. 6,054,576, U.S. Pat. No. 6,162,909, U.S. Pat. No. 6,303,773, or Scaringe supra, incorporated by reference herein in their entireties. Additionally, deprotection conditions can be modified to provide the best possible yield and purity of siNA constructs. For example, applicant has observed that oligonucleotides comprising 2′-deoxy-2′-fluoro nucleotides can degrade under inappropriate deprotection conditions. Such oligonucleotides are deprotected using aqueous methylamine at about 35° C. for 30 minutes. If the 2′-deoxy-2′-fluoro containing oligonucleotide also comprises ribonucleotides, after deprotection with aqueous methylamine at about 35° C. for 30 minutes, TEA-HF is added and the reaction maintained at about 65° C. for an additional 15 minutes.

### Example 6

### RNAi In Vitro Assay to Assess siNA Activity

[0382] An in vitro assay that recapitulates RNAi in a cell-free system is used to evaluate siNA constructs targeting SARS RNA targets. The assay comprises the system described by Tuschl et al., 1999, Genes and Development, 13, 3191-3197 and Zamore et al., 2000, Cell, 101, 25-33 adapted for use with SARS target RNA. A Drosophila extract derived from syncytial blastoderm is used to reconstitute RNAi activity in vitro. Target RNA is generated via in vitro transcription from an appropriate SARS expressing plasmid using T7 RNA polymerase or via chemical synthesis as described herein. Sense and antisense siNA strands (for example 20 uM each) are annealed by incubation in buffer (such as 100 mM potassium acetate, 30 mM HEPES-KOH, pH 7.4, 2 mM magnesium acetate) for 1 minute at 90° C. followed by 1 hour at 37° C., then diluted in lysis buffer (for example 100 mM potassium acetate, 30 mM HEPES-KOH at pH 7.4, 2 mM magnesium acetate). Annealing can be monitored by gel electrophoresis on an agarose gel in TBE buffer and stained with ethidium bromide. The Drosophila lysate is prepared using zero to two-hour-old embryos from Oregon R flies collected on yeasted molasses agar that are dechorionated and lysed. The lysate is centrifuged and the supernatant isolated. The assay comprises a reaction mixture containing 50% lysate [vol/vol], RNA (10-50 pM final concentration), and 10% [vol/vol] lysis buffer containing siNA (10 nM final concentration). The reaction mixture also contains 10 mM creatine phosphate, 10 ug/ml creatine phosphokinase, 100 um GTP, 100 uM UTP, 100 uM CTP, 500 uM ATP, 5 mM DTT, 0.1 U/uL RNasin (Promega), and 100 uM of each amino acid. The final concentration of potassium acetate is adjusted to 100 mM. The reactions are pre-assembled on ice and preincubated at 25° C. for 10 minutes before adding RNA, then incubated at 25° C. for an additional 60 minutes. Reactions are quenched with 4 volumes of 1.25× Passive Lysis Buffer (Promega). Target RNA cleavage is assayed by RT-PCR analysis or other methods known in the art and are compared to control reactions in which siNA is omitted from the reaction.

[0383] Alternately, internally-labeled target RNA for the assay is prepared by in vitro transcription in the presence of [alpha-³²P] CTP, passed over a G 50 Sephadex column by spin chromatography and used as target RNA without further purification. Optionally, target RNA is 5′-³²P-end labeled using T4 polynucleotide kinase enzyme. Assays are performed as described above and target RNA and the specific RNA cleavage products generated by RNAi are visualized on an autoradiograph of a gel. The percentage of cleavage is determined by PHOSPHOR IMAGER® (autoradiography) quantitation of bands representing intact control RNA or RNA from control reactions without siNA and the cleavage products generated by the assay.

[0384] In one embodiment, this assay is used to determine target sites the SARS RNA target for siNA mediated RNAi cleavage, wherein a plurality of siNA constructs are screened for RNAi mediated cleavage of the SARS RNA target, for example, by analyzing the assay reaction by electrophoresis of labeled target RNA, or by Northern blotting, as well as by other methodology well known in the art.

### Example 7

### Nucleic Acid Inhibition of SARS Target RNA In Vitro

[0385] siNA molecules targeted to the human SARS RNA are designed and synthesized as described above. These nucleic acid molecules can be tested for cleavage activity in vivo, for example, using the following procedure. The target sequences and the nucleotide location within the SARS RNA are given in Table II and III.

[0386] Two formats are used to test the efficacy of siNAs targeting SARS. First, the reagents are tested in cell culture using, for example, VERO cells and/or FRhk-4 cells, to determine the extent of RNA and protein inhibition. siNA reagents (e.g.; see Tables II and III) are selected against the SARS target as described herein. RNA inhibition is measured after delivery of these reagents by a suitable transfection agent to, for example, VERO cells and/or FRhk-4 cells. Relative amounts of target RNA are measured versus actin using real-time PCR monitoring of amplification (e.g., ABI 7700 TAQMAN®). A comparison is made to a mixture of oligonucleotide sequences made to unrelated targets or to a randomized siNA control with the same overall length and chemistry, but randomly substituted at each position. Primary and secondary lead reagents are chosen for the target and optimization performed. After an optimal transfection agent concentration is chosen, a RNA time-course of inhibition is performed with the lead siNA molecule. In addition, a cell-plating format can be used to determine RNA inhibition.

Delivery of siNA to Cells

[0387] Cells (e.g., VERO cells and/or FRhk-4 cells infected with the SARS virus) are seeded, for example, at 1×10⁵ cells per well of a six-well dish in EGM-2 (BioWhittaker) the day before transfection. siNA (final concentration, for example 20 nM) and cationic lipid (e.g., final concentration 2 μg/ml) are complexed in EGM basal media (Bio Whittaker) at 37° C. for 30 minutes in polystyrene tubes. Following vortexing, the complexed siNA is added to each well and incubated for the times indicated. For initial optimization experiments, cells are seeded, for example, at 1×10³ in 96 well plates and siNA complex added as described. Efficiency of delivery of siNA to cells is determined using a fluorescent siNA complexed with lipid. Cells in 6-well dishes are incubated with siNA for 24 hours, rinsed with PBS and fixed in 2% paraformaldehyde for 15 minutes at room temperature. Uptake of siNA is visualized using a fluorescent microscope.

[0388] TAQMAN® (Real-Time PCR Monitoring of Amplification) and Lightcycler Quantification of mRNA

[0389] Total RNA is prepared from cells following siNA delivery, for example, using Qiagen RNA purification kits for 6-well or Rneasy extraction kits for 96-well assays. For TAQMAN® analysis (real-time PCR monitoring of amplification), dual-labeled probes are synthesized with the reporter dye, FAM or JOE, covalently linked at the 5′-end and the quencher dye TAMRA conjugated to the 3′-end. One-step RT-PCR amplifications are performed on, for example, an ABI PRISM 7700 Sequence Detector using 50 μl reactions consisting of 10 μl total RNA, 100 nM forward primer, 900 nM reverse primer, 100 nM probe, 1× TAQMAN® PCR reaction buffer (PE-Applied Biosystems), 5.5 mM MgCl₂, 300 μM each dATP, dCTP, dGTP, and dTTP, IOU RNase Inhibitor (Promega), 1.25 U AMPLITAQ GOLD® (DNA polymerase) (PE-Applied Biosystems) and IOU M-MLV Reverse Transcriptase (Promega). The thermal cycling conditions can consist of 30 minutes at 48° C., 10 minutes at 95° C., followed by 40 cycles of 15 seconds at 95° C. and 1 minute at 60° C. Quantitation of mRNA levels is determined relative to standards generated from serially diluted total cellular RNA (300, 100, 33, 11 ng/r×n) and normalizing to β-actin or GAPDH mRNA in parallel TAQMAN® reactions (real-time PCR monitoring of amplification). For each gene of interest an upper and lower primer and a fluorescently labeled probe are designed. Real time incorporation of SYBR Green I dye into a specific PCR product can be measured in glass capillary tubes using a lightcyler. A standard curve is generated for each primer pair using control cRNA. Values are represented as relative expression to GAPDH in each sample.

### Western Blotting

[0390] Nuclear extracts can be prepared using a standard micro preparation technique (see for example Andrews and Faller, 1991, Nucleic Acids Research, 19, 2499). Protein extracts from supernatants are prepared, for example using TCA precipitation. An equal volume of 20% TCA is added to the cell supernatant, incubated on ice for 1 hour and pelleted by centrifugation for 5 minutes. Pellets are washed in acetone, dried and resuspended in water. Cellular protein extracts are run on a 10% Bis-Tris NuPage (nuclear extracts) or 4-12% Tris-Glycine (supernatant extracts) polyacrylamide gel and transferred onto nitro-cellulose membranes. Non-specific binding can be blocked by incubation, for example, with 5% non-fat milk for 1 hour followed by primary antibody for 16 hour at 4° C. Following washes, the secondary antibody is applied, for example (1:10,000 dilution) for 1 hour at room temperature and the signal detected with SuperSignal reagent (Pierce).

### Example 8

### RNAi Mediated Inhibition of SARS RNA Expression

[0391] siNA constructs (e.g., siNA constructs shown in Table III) are tested for efficacy in reducing SARS RNA expression in, for example, VERO cells and/or FRhk-4 cells. Cells are plated approximately 24h before transfection in 96-well plates at 5,000-7,500 cells/well, 100 μl/well, such that at the time of transfection cells are 70-90% confluent. For transfection, annealed siNAs are mixed with the transfection reagent (Lipofectamine 2000, Invitrogen) in a volume of 50 μl/well and incubated for 20 minutes at room temperature. The siNA transfection mixtures are added to cells to give a final siNA concentration of 25 nM in a volume of 150 μl. Each siNA transfection mixture is added to 3 wells for triplicate siNA treatments. Cells are incubated at 37° for 24 h in the continued presence of the siNA transfection mixture. At 24h, RNA is prepared from each well of treated cells. The supernatants with the transfection mixtures are first removed and discarded, then the cells are lysed and RNA prepared from each well. Target gene expression following treatment is evaluated by RT-PCR for the target gene and for a control gene (36B4, an RNA polymerase subunit) for normalization. The triplicate data is averaged and the standard deviations determined for each treatment. Normalized data are graphed and the percent reduction of target mRNA by active siNAs in comparison to their respective inverted control siNAs is determined.

[0392] In a non-limiting example, an siNA construct comprising ribonucleotides and 3′-terminal dithymidine caps is assayed along with a chemically modified siNA construct comprising 2′-deoxy-2′-fluoro pyrimidine nucleotides and purine ribonucleotides in which the sense strand of the siNA is further modified with 5′ and 3′-terminal inverted deoxyabasic caps and the antisense strand comprises a 3′-terminal phosphorothioate internucleotide linkage. Additional stabilization chemistries as described in Table IV are similarly assayed for activity. These siNA constructs are compared to appropriate matched chemistry inverted controls. In addition, the siNA constructs are also compared to untreated cells, cells transfected with lipid and scrambled siNA constructs, and cells transfected with lipid alone (transfection control).

### Example 9

### Animal Models

[0393] Evaluating the efficacy of anti-SARS agents in animal models is an important prerequisite to human clinical trials. Byron et al., 2003, Nature, 425, 915, describe ferret and feline animal models of SARS virus infection. Haagmans et al., 2004, Nature Medicine, 10, 290-293, describe the use of pegylated interferon-alpha in protecting type I pneumocytes against SARS coronavirus infection in macaques. Gao et al., 2003, Lancet, 362, 1895-6, describe the use of a SARS virus vaccine in monkeys. All of these models can be adapted for use for pre-clinical evaluation of the efficacy of nucleic acid compositions of the invention in modulating SARS virus gene expression toward therapeutic use.

### Example 10

### Indications

[0394] The present body of knowledge in SARS research indicates the need for methods to assay SARS activity and for compounds that can regulate SARS expression for research, diagnostic, and therapeutic use. As described herein, the nucleic acid molecules of the present invention can be used in assays to diagnose disease state related of SARS levels. In addition, the nucleic acid molecules can be used to treat disease state related to SARS levels.

[0395] Particular degenerative and disease states that can be associated with SARS expression modulation include, but are not limited to, SARS virus infection, liver failure, hepatocellular carcinoma, cirrhosis, and/or other disease states associated with SARS virus infection.

[0396] Immunomodulators, steroids, and anti-viral compounds are non-limiting examples of pharmaceutical agents that can be combined with or used in conjunction with the nucleic acid molecules (e.g. siNA molecules) of the instant invention. The use of ribavirin and oseltamivir are non-limiting examples of chemotherapeutic agents that can be combined with or used in conjunction with the nucleic acid molecules (e.g. siNA molecules) of the instant invention. Those skilled in the art will recognize that other anti-cancer compounds and therapies can similarly be readily combined with the nucleic acid molecules of the instant invention (e.g. siNA molecules) and are hence within the scope of the instant invention.

### Example 11

### Interferons

[0397] Interferons represent a non-limiting example of a class of compounds that can be used in conjunction with the siNA molecules of the invention for treating the diseases and/or conditions described herein. Type I interferons (IFN) are a class of natural cytokines that includes a family of greater than 25 IFN-α (Pesta, 1986, Methods Enzymol. 119, 3-14) as well as IFN-β, and IFN-ω. Although evolutionarily derived from the same gene (Diaz et al., 1994, Genomics 22, 540-552), there are many differences in the primary sequence of these molecules, implying an evolutionary divergence in biologic activity. All type I IFN share a common pattern of biologic effects that begin with binding of the IFN to the cell surface receptor (Pfeffer & Strulovici, 1992, Transmembrane secondary messengers for IFN-α/β. In: Interferon. Principles and Medical Applications., S. Baron, D. H. Coopenhaver, F. Dianzani, W. R. Fleischmann Jr., T. K. Hughes Jr., G. R. Kimpel, D. W. Niesel, G. J. Stanton, and S. K. Tyring, eds. 151-160). Binding is followed by activation of tyrosine kinases, including the Janus tyrosine kinases and the STAT proteins, which leads to the production of several IFN-stimulated gene products (Johnson et al., 1994, Sci. Am. 270, 68-75). The IFN-stimulated gene products are responsible for the pleotropic biologic effects of type I IFN, including antiviral, antiproliferative, and immunomodulatory effects, cytokine induction, and HLA class I and class II regulation (Pestka et al., 1987, Annu. Rev. Biochem 56, 727). Examples of IFN-stimulated gene products include 2-5-oligoadenylate synthetase (2-50AS), β₂-microglobulin, neopterin, p68 kinases, and the Mx protein (Chebath & Revel, 1992, The 2-5 A system: 2-5 A synthetase, isospecies and functions. In: Interferon. Principles and Medical Applications, S. Baron, D. H. Coopenhaver, F. Dianzani, W. R. Jr. Fleischmann, T. K. Jr Hughes, G. R. Kimpel, D. W. Niesel, G. J. Stanton, and S. K. Tyring, eds., pp. 225-236; Samuel, 1992, The RNA-dependent P1/eIF-2α protein kinase. In: Interferon. Principles and Medical Applications. S. Baron, D. H. Coopenhaver, F. Dianzani, W. R. Fleischmann Jr., T. K. Hughes Jr., G. R. Kimpel, D. W. Niesel, G. H. Stanton, and S. K. Tyring, eds. 237-250; Horisberger, 1992, MX protein: function and Mechanism of Action. In: Interferon. Principles and Medical Applications. S. Baron, D. H. Coopenhaver, F. Dianzani, W. R. Fleischmann Jr., T. K. Hughes Jr., G. R. Kimpel, D. W. Niesel, G. H. Stanton, and S. K. Tyring, eds. 215-224). Although all type I IFN have similar biologic effects, not all the activities are shared by each type I IFN, and in many cases, the extent of activity varies quite substantially for each IFN subtype (Fish et al, 1989, J. Interferon Res. 9, 97-114; Ozes et al., 1992, J. Interferon Res. 12, 55-59). More specifically, investigations into the properties of different subtypes of IFN-α and molecular hybrids of IFN-α have shown differences in pharmacologic properties (Rubinstein, 1987, J. Interferon Res. 7, 545-551). These pharmacologic differences can arise from as few as three amino acid residue changes (Lee et al., 1982, Cancer Res. 42, 1312-1316).

[0398] Eighty-five to 166 amino acids are conserved in the known IFN-α subtypes. Excluding the IFN-α pseudogenes, there are approximately 25 known distinct IFN-α subtypes. Pairwise comparisons of these nonallelic subtypes show primary sequence differences ranging from 2% to 23%. In addition to the naturally occurring IFNs, a non-natural recombinant type I interferon known as consensus interferon (CIFN) has been synthesized as a therapeutic compound (Tong et al., 1997, Hepatology 26, 747-754).

[0399] Interferon is currently in use for at least 12 different indications, including infectious and autoimmune diseases and cancer (Borden, 1992, N. Engl. J. Med. 326, 1491-1492). For autoimmune diseases, IFN has been utilized for treatment of rheumatoid arthritis, multiple sclerosis, and Crohn's disease. For treatment of cancer, IFN has been used alone or in combination with a number of different compounds. Specific types of cancers for which IFN has been used include squamous cell carcinomas, melanomas, hypernephromas, hemangiomas, hairy cell leukemia, and Kaposi's sarcoma. In the treatment of infectious diseases, IFNs increase the phagocytic activity of macrophages and cytotoxicity of lymphocytes and inhibits the propagation of cellular pathogens. Specific indications for which IFN has been used as treatment include hepatitis B, human papillomavirus types 6 and 11 (i.e. genital warts) (Leventhal et al., 1991, N Engl J Med 325, 613-617), chronic granulomatous disease, and SARS virus.

[0400] Pegylated interferons, i.e., interferons conjugated with polyethylene glycol (PEG), have demonstrated improved characteristics over interferon. Advantages incurred by PEG conjugation can include an improved pharmacokinetic profile compared to interferons lacking PEG, thus imparting more convenient dosing regimes, improved tolerance, and improved antiviral efficacy. Such improvements have been demonstrated in clinical studies of both polyethylene glycol interferon alfa-2a (PEGASYS, Roche) and polyethylene glycol interferon alfa-2b (VIRAFERON PEG, PEG-INTRON, Enzon/Schering Plough).

[0401] siNA molecules in combination with interferons and polyethylene glycol interferons have the potential to improve the effectiveness of treatment of SARS or any of the other indications discussed above. siNA molecules targeting RNAs associated with SARS virus infection can be used individually or in combination with other therapies such as interferons and polyethylene glycol interferons and to achieve enhanced efficacy.

### Example 12

### Diagnostic Uses

[0402] The siNA molecules of the invention can be used in a variety of diagnostic applications, such as in the identification of molecular targets (e.g., RNA) in a variety of applications, for example, in clinical, industrial, environmental, agricultural and/or research settings. Such diagnostic use of siNA molecules involves utilizing reconstituted RNAi systems, for example, using cellular lysates or partially purified cellular lysates. siNA molecules of this invention can be used as diagnostic tools to examine genetic drift and mutations within diseased cells or to detect the presence of endogenous or exogenous, for example viral, RNA in a cell. The close relationship between siNA activity and the structure of the target RNA allows the detection of mutations in any region of the molecule, which alters the base-pairing and three-dimensional structure of the target RNA. By using multiple siNA molecules described in this invention, one can map nucleotide changes, which are important to RNA structure and function in vitro, as well as in cells and tissues. Cleavage of target RNAs with siNA molecules can be used to inhibit gene expression and define the role of specified gene products in the progression of disease or infection. In this manner, other genetic targets can be defined as important mediators of the disease. These experiments will lead to better treatment of the disease progression by affording the possibility of combination therapies (e.g., multiple siNA molecules targeted to different genes, siNA molecules coupled with known small molecule inhibitors, or intermittent treatment with combinations siNA molecules and/or other chemical or biological molecules). Other in vitro uses of siNA molecules of this invention are well known in the art, and include detection of the presence of mRNAs associated with a disease, infection, or related condition. Such RNA is detected by determining the presence of a cleavage product after treatment with an siNA using standard methodologies, for example, fluorescence resonance emission transfer (FRET).

[0403] In a specific example, siNA molecules that cleave only wild-type or mutant forms of the target RNA are used for the assay. The first siNA molecules (i.e., those that cleave only wild-type forms of target RNA) are used to identify wild-type RNA present in the sample and the second siNA molecules (i.e., those that cleave only mutant forms of target RNA) are used to identify mutant RNA in the sample. As reaction controls, synthetic substrates of both wild-type and mutant RNA are cleaved by both siNA molecules to demonstrate the relative siNA efficiencies in the reactions and the absence of cleavage of the “non-targeted” RNA species. The cleavage products from the synthetic substrates also serve to generate size markers for the analysis of wild-type and mutant RNAs in the sample population. Thus, each analysis requires two siNA molecules, two substrates and one unknown sample, which is combined into six reactions. The presence of cleavage products is determined using an RNase protection assay so that full-length and cleavage fragments of each RNA can be analyzed in one lane of a polyacrylamide gel. It is not absolutely required to quantify the results to gain insight into the expression of mutant RNAs and putative risk of the desired phenotypic changes in target cells. The expression of mRNA whose protein product is implicated in the development of the phenotype (i.e., disease related or infection related) is adequate to establish risk. If probes of comparable specific activity are used for both transcripts, then a qualitative comparison of RNA levels is adequate and decreases the cost of the initial diagnosis. Higher mutant form to wild-type ratios are correlated with higher risk whether RNA levels are compared qualitatively or quantitatively.

[0404] All patents and publications mentioned in the specification are indicative of the levels of skill of those skilled in the art to which the invention pertains. All references cited in this disclosure are incorporated by reference to the same extent as if each reference had been incorporated by reference in its entirety individually.

[0405] One skilled in the art would readily appreciate that the present invention is well adapted to carry out the objects and obtain the ends and advantages mentioned, as well as those inherent therein. The methods and compositions described herein as presently representative of preferred embodiments are exemplary and are not intended as limitations on the scope of the invention. Changes therein and other uses will occur to those skilled in the art, which are encompassed within the spirit of the invention, are defined by the scope of the claims.

[0406] It will be readily apparent to one skilled in the art that varying substitutions and modifications can be made to the invention disclosed herein without departing from the scope and spirit of the invention. Thus, such additional embodiments are within the scope of the present invention and the following claims. The present invention teaches one skilled in the art to test various combinations and/or substitutions of chemical modifications described herein toward generating nucleic acid constructs with improved activity for mediating RNAi activity. Such improved activity can comprise improved stability, improved bioavailability, and/or improved activation of cellular responses mediating RNAi. Therefore, the specific embodiments described herein are not limiting and one skilled in the art can readily appreciate that specific combinations of the modifications described herein can be tested without undue experimentation toward identifying siNA molecules with improved RNAi activity.

[0407] The invention illustratively described herein suitably can be practiced in the absence of any element or elements, limitation or limitations that are not specifically disclosed herein. Thus, for example, in each instance herein any of the terms “comprising”, “consisting essentially of”, and “consisting of” may be replaced with either of the other two terms. The terms and expressions which have been employed are used as terms of description and not of limitation, and there is no intention that in the use of such terms and expressions of excluding any equivalents of the features shown and described or portions thereof, but it is recognized that various modifications are possible within the scope of the invention claimed. Thus, it should be understood that although the present invention has been specifically disclosed by preferred embodiments, optional features, modification and variation of the concepts herein disclosed may be resorted to by those skilled in the art, and that such modifications and variations are considered to be within the scope of this invention as defined by the description and the appended claims.

[0408] In addition, where features or aspects of the invention are described in terms of Markush groups or other grouping of alternatives, those skilled in the art will recognize that the invention is also thereby described in terms of any individual member or subgroup of members of the Markush group or other group.

TABLE I
SARS virus Accession Numbers

| | | | |
|---|---|---|---|
| LOCUS | NC_004718 | 29736 bp ss-RNA | linear VRL |
| | | | 15-APR-2003 |

| | |
|---|---|
| DEFINITION | SARS coronavirus, complete genome. |
| ACCESSION | NC_004718 |

TABLE II

SARS siNA and Target Sequences
SARS CoV NC_004718

| | | | | | | | | |
|---|---|---|---|---|---|---|---|---|
| Pos | Seq | Seq ID | UPos | Upper seq | Seq ID | LPos | Lower seq | Seq ID |

| | | | | | | | | |
|---|---|---|---|---|---|---|---|---|
| 3 | ACCCAGGAAAAGCCAACCA | 1 | 3 | ACCCAGGAAAAGCCAACCA | 1 | 21 | UGGUUGGCUUUUCCUGGGU | 1652 |
| 21 | AACCUCGAUCUCUUGUAGA | 2 | 21 | AACCUCGAUCUCUUGUAGA | 2 | 39 | UCUACAAGAGAUCGAGGUU | 1653 |
| 39 | AUCUGUUCUCUAAACGAAC | 3 | 39 | AUCUGUUCUCUAAACGAAC | 3 | 57 | GUUCGUUUAGAGAACAGAU | 1654 |
| 57 | CUUUAAAAUCUGUGUAGCU | 4 | 57 | CUUUAAAAUCUGUGUAGCU | 4 | 75 | AGCUACACAGAUUUUAAAG | 1655 |
| 75 | UGUCGCUCGGCUGCAUGCC | 5 | 75 | UGUCGCUCGGCUGCAUGCC | 5 | 93 | GGCAUGCAGCCGAGCGACA | 1656 |
| 93 | CUAGUGCACCUACGCAGUA | 6 | 93 | CUAGUGCACCUACGCAGUA | 6 | 111 | UACUGCGUAGGUGCACUAG | 1657 |
| 111 | AUAAACAAUAAUAAAUUUU | 7 | 111 | AUAAACAAUAAUAAAUUUU | 7 | 129 | AAAAUUUAUUAUUGUUUAU | 1658 |
| 129 | UACUGUCGUUGACAAGAAA | 8 | 129 | UACUGUCGUUGACAAGAAA | 8 | 147 | UUUCUUGUCAACGACAGUA | 1659 |
| 147 | ACGAGUAACUCGUCCCUCU | 9 | 147 | ACGAGUAACUCGUCCCUCU | 9 | 165 | AGAGGGACGAGUUACUCGU | 1660 |
| 165 | UUCUGCAGACUGCUUACGG | 10 | 165 | UUCUGCAGACUGCUUACGG | 10 | 183 | CCGUAAGCAGUCUGCAGAA | 1661 |
| 183 | GUUUCGUCCGUGUUGCAGU | 11 | 183 | GUUUCGUCCGUGUUGCAGU | 11 | 201 | ACUGCAACACGGACGAAAC | 1662 |
| 201 | UCGAUCAUCAGCAUACCUA | 12 | 201 | UCGAUCAUCAGCAUACCUA | 12 | 219 | UAGGUAUGCUGAUGAUCGA | 1663 |
| 219 | AGGUUUCGUCCGGGUGUGA | 13 | 219 | AGGUUUCGUCCGGGUGUGA | 13 | 237 | UCACACCCGGACGAAACCU | 1664 |
| 237 | ACCGAAAGGUAAGAUGGAG | 14 | 237 | ACCGAAAGGUAAGAUGGAG | 14 | 255 | CUCCAUCUUACCUUUCGGU | 1665 |
| 255 | GAGCCUUGUUCUUGGUGUC | 15 | 255 | GAGCCUUGUUCUUGGUGUC | 15 | 273 | GACACCAAGAACAAGGCUC | 1666 |
| 273 | CAACGAGAAAACACACGUC | 16 | 273 | CAACGAGAAAACACACGUC | 16 | 291 | GACGUGUGUUUUCUCGUUG | 1667 |
| 291 | CCAACUCAGUUUGCCUGUC | 17 | 291 | CCAACUCAGUUUGCCUGUC | 17 | 309 | GACAGGCAAACUGAGUUGG | 1668 |
| 309 | CCUUCAGGUUAGAGACGUG | 18 | 309 | CCUUCAGGUUAGAGACGUG | 18 | 327 | CACGUCUCUAACCUGAAGG | 1669 |
| 327 | GCUAGUGCGUGGCUUCGGG | 19 | 327 | GCUAGUGCGUGGCUUCGGG | 19 | 345 | CCCGAAGCCACGCACUAGC | 1670 |
| 345 | GGACUCUGUGGAAGAGGCC | 20 | 345 | GGACUCUGUGGAAGAGGCC | 20 | 363 | GGCCUCUUCCACAGAGUCC | 1671 |
| 363 | CCUAUCGGAGGCACGUGAA | 21 | 363 | CCUAUCGGAGGCACGUGAA | 21 | 381 | UUCACGUGCCUCCGAUAGG | 1672 |
| 381 | ACACCUCAAAAAUGGCACU | 22 | 381 | ACACCUCAAAAAUGGCACU | 22 | 399 | AGUGCCAUUUUUGAGGUGU | 1673 |
| 399 | UUGUGGUCUAGUAGAGCUG | 23 | 399 | UUGUGGUCUAGUAGAGCUG | 23 | 417 | CAGCUCUACUAGACCACAA | 1674 |
| 417 | GGAAAAAGGCGUACUGCCC | 24 | 417 | GGAAAAAGGCGUACUGCCC | 24 | 435 | GGGCAGUACGCCUUUUUCC | 1675 |
| 435 | CCAGCUUGAACAGCCCUAU | 25 | 435 | CCAGCUUGAACAGCCCUAU | 25 | 453 | AUAGGGCUGUUCAAGCUGG | 1676 |
| 453 | UGUGUUCAUUAAACGUUCU | 26 | 453 | UGUGUUCAUUAAACGUUCU | 26 | 471 | AGAACGUUUAAUGAACACA | 1677 |
| 471 | UGAUGCCUUAAGCACCAAU | 27 | 471 | UGAUGCCUUAAGCACCAAU | 27 | 489 | AUUGGUGCUUAAGGCAUCA | 1678 |
| 489 | UCACGGCCACAAGGUCGUU | 28 | 489 | UCACGGCCACAAGGUCGUU | 28 | 507 | AACGACCUUGUGGCCGUGA | 1679 |
| 507 | UGAGCUGGUUGCAGAAAUG | 29 | 507 | UGAGCUGGUUGCAGAAAUG | 29 | 525 | CAUUUCUGCAACCAGCUCA | 1680 |
| 525 | GGACGGCAUUCAGUACGGU | 30 | 525 | GGACGGCAUUCAGUACGGU | 30 | 543 | ACCGUACUGAAUGCCGUCC | 1681 |
| 543 | UCGUAGCGGUAUAACACUG | 31 | 543 | UCGUAGCGGUAUAACACUG | 31 | 561 | CAGUGUUAUACCGCUACGA | 1682 |
| 561 | GGGAGUACUCGUGCCACAU | 32 | 561 | GGGAGUACUCGUGCCACAU | 32 | 579 | AUGUGGCACGAGUACUCCC | 1683 |
| 579 | UGUGGGCGAAACCCCAAUU | 33 | 579 | UGUGGGCGAAACCCCAAUU | 33 | 597 | AAUUGGGGUUUCGCCCACA | 1684 |
| 597 | UGCAUACCGCAAUGUUCUU | 34 | 597 | UGCAUACCGCAAUGUUCUU | 34 | 615 | AAGAACAUUGCGGUAUGCA | 1685 |
| 615 | UCUUCGUAAGAACGGUAAU | 35 | 615 | UCUUCGUAAGAACGGUAAU | 35 | 633 | AUUACCGUUCUUACGAAGA | 1686 |
| 633 | UAAGGGAGCCGGUGGUCAU | 36 | 633 | UAAGGGAGCCGGUGGUCAU | 36 | 651 | AUGACCACCGGCUCCCUUA | 1687 |
| 651 | UAGCUAUGGCAUCGAUCUA | 37 | 651 | UAGCUAUGGCAUCGAUCUA | 37 | 669 | UAGAUCGAUGCCAUAGCUA | 1688 |
| 669 | AAAGUCUUAUGACUUAGGU | 38 | 669 | AAAGUCUUAUGACUUAGGU | 38 | 687 | ACCUAAGUCAUAAGACUUU | 1689 |
| 687 | UGACGAGCUUGGCACUGAU | 39 | 687 | UGACGAGCUUGGCACUGAU | 39 | 705 | AUCAGUGCCAAGCUCGUCA | 1690 |
| 705 | UCCCAUUGAAGAUUAUGAA | 40 | 705 | UCCCAUUGAAGAUUAUGAA | 40 | 723 | UUCAUAAUCUUCAAUGGGA | 1691 |
| 723 | ACAAAACUGGAACACUAAG | 41 | 723 | ACAAAACUGGAACACUAAG | 41 | 741 | CUUAGUGUUCCAGUUUUGU | 1692 |
| 741 | GCAUGGCAGUGGUGCACUC | 42 | 741 | GCAUGGCAGUGGUGCACUC | 42 | 759 | GAGUGCACCACUGCCAUGU | 1693 |
| 759 | CCGUGAACUCACUCGUGAG | 43 | 759 | CCGUGAACUCACUCGUGAG | 43 | 777 | CUCACGAGUGAGUUCACGG | 1694 |
| 777 | GCUCAAUGGAGGUGCAGUC | 44 | 777 | GCUCAAUGGAGGUGCAGUC | 44 | 795 | GACUGCACCUCCAUUGAGC | 1695 |
| 795 | CACUCGCUAUGUCGACAAC | 45 | 795 | CACUCGCUAUGUCGACAAC | 45 | 813 | GUUGUCGACAUAGCGAGUG | 1696 |
| 813 | CAAUUUCUGUGGCCCAGAU | 46 | 813 | CAAUUUCUGUGGCCCAGAU | 46 | 831 | AUCUGGGCCACAGAAAUUG | 1697 |
| 831 | UGGGUACCCUCUUGAUUGC | 47 | 831 | UGGGUACCCUCUUGAUUGC | 47 | 849 | GCAAUCAAGAGGGUACCCA | 1698 |
| 849 | CAUCAAAGAUUUUCUCGCA | 48 | 849 | CAUCAAAGAUUUUCUCGCA | 48 | 867 | UGCGAGAAAAUCUUUGAUG | 1699 |
| 867 | ACGCGCGGGCAAGUCAAUG | 49 | 867 | ACGCGCGGGCAAGUCAAUG | 49 | 885 | CAUUGACUUGCCCGCGCGU | 1700 |
| 885 | GUGCACUCUUUCCGAACAA | 50 | 885 | GUGCACUCUUUCCGAACAA | 50 | 903 | UUGUUCGGAAAGAGUGCAC | 1701 |
| 903 | ACUUGAUUACAUCGAGUCG | 51 | 903 | ACUUGAUUACAUCGAGUCG | 51 | 921 | CGACUCGAUGUAAUCAAGU | 1702 |
| 921 | GAAGAGAGGUGUCUACUGC | 52 | 921 | GAAGAGAGGUGUCUACUGC | 52 | 939 | GCAGUAGACACCUCUCUUC | 1703 |
| 939 | CUGCCGUGACCAUGAGCAU | 53 | 939 | CUGCCGUGACCAUGAGCAU | 53 | 957 | AUGCUCAUGGUCACGGCAG | 1704 |
| 957 | UGAAAUUGCCUGGUUCACU | 54 | 957 | UGAAAUUGCCUGGUUCACU | 54 | 975 | AGUGAACCAGGCAAUUUCA | 1705 |
| 975 | UGAGCGCUCUGAUAAGAGC | 55 | 975 | UGAGCGCUCUGAUAAGAGC | 55 | 993 | GCUCUUAUCAGAGCGCUCA | 1706 |
| 993 | CUACGAGCACCAGACACCC | 56 | 993 | CUACGAGCACCAGACACCC | 56 | 1011 | GGGUGUCUGGUGCUCGUAG | 1707 |
| 1011 | CUUCGAAAUUAAGAGUGCC | 57 | 1011 | CUUCGAAAUUAAGAGUGCC | 57 | 1029 | GGCACUCUUAAUUUCGAAG | 1708 |
| 1029 | CAAGAAAUUUGACACUUUC | 58 | 1029 | CAAGAAAUUUGACACUUUC | 58 | 1047 | GAAAGUGUCAAAUUUCUUG | 1709 |
| 1047 | CAAAGGGGAAUGCCCAAAG | 59 | 1047 | CAAAGGGGAAUGCCCAAAG | 59 | 1065 | CUUUGGGCAUUCCCCUUUG | 1710 |
| 1065 | GUUUGUGUUUCCUCUUAAC | 60 | 1065 | GUUUGUGUUUCCUCUUAAC | 60 | 1083 | GUUAAGAGGAAACACAAAC | 1711 |
| 1083 | CUCAAAAGUCAAAGUCAUU | 61 | 1083 | CUCAAAAGUCAAAGUCAUU | 61 | 1101 | AAUGACUUUGACUUUUGAG | 1712 |
| 1101 | UCAACCACGUGUUGAAAAG | 62 | 1101 | UCAACCACGUGUUGAAAAG | 62 | 1119 | CUUUUCAACACGUGGUUGA | 1713 |
| 1119 | GAAAAAGACUGAGGGUUUC | 63 | 1119 | GAAAAAGACUGAGGGUUUC | 63 | 1137 | GAAACCCUCAGUCUUUUUC | 1714 |
| 1137 | CAUGGGGCGUAUACGCUCU | 64 | 1137 | CAUGGGGCGUAUACGCUCU | 64 | 1155 | AGAGCGUAUACGCCCCAUG | 1715 |
| 1155 | UGUGUACCCUGUUGCAUCU | 65 | 1155 | UGUGUACCCUGUUGCAUCU | 65 | 1173 | AGAUGCAACAGGGUACACA | 1716 |
| 1173 | UCCACAGGAGUGUAACAAU | 66 | 1173 | UCCACAGGAGUGUAACAAU | 66 | 1191 | AUUGUUACACUCCUGUGGA | 1717 |
| 1191 | UAUGCACUUGUCUACCUUG | 67 | 1191 | UAUGCACUUGUCUACCUUG | 67 | 1209 | CAAGGUAGACAAGUGCAUA | 1718 |
| 1209 | GAUGAAAUGUAAUCAUUGC | 68 | 1209 | GAUGAAAUGUAAUCAUUGC | 68 | 1227 | GCAAUGAUUACAUUUCAUC | 1719 |
| 1227 | CGAUGAAGUUUCAUGGCAG | 69 | 1227 | CGAUGAAGUUUCAUGGCAG | 69 | 1245 | CUGCCAUGAAACUUCAUCG | 1720 |
| 1245 | GACGUGCGACUUUCUGAAA | 70 | 1245 | GACGUGCGACUUUCUGAAA | 70 | 1263 | UUUCAGAAAGUCGCACGUC | 1721 |
| 1263 | AGCCACUUGUGAACAUUGU | 71 | 1263 | AGCCACUUGUGAACAUUGU | 71 | 1281 | ACAAUGUUCACAAGUGGCU | 1722 |
| 1281 | UGGCACUGAAAAUUUAGUU | 72 | 1281 | UGGCACUGAAAAUUUAGUU | 72 | 1299 | AACUAAAUUUUCAGUGCCA | 1723 |
| 1299 | UAUUGAAGGACCUACUACA | 73 | 1299 | UAUUGAAGGACCUACUACA | 73 | 1317 | UGUAGUAGGUCCUUCAAUA | 1724 |
| 1317 | AUGUGGGUACCUACCUACU | 74 | 1317 | AUGUGGGUACCUACCUACU | 74 | 1335 | AGUAGGUAGGUACCCACAU | 1725 |
| 1335 | UAAUGCUGUAGUGAAAAUG | 75 | 1335 | UAAUGCUGUAGUGAAAAUG | 75 | 1353 | CAUUUUCACUACAGCAUUA | 1726 |
| 1353 | GCCAUGUCCUGCCUGUCAA | 76 | 1353 | GCCAUGUCCUGCCUGUCAA | 76 | 1371 | UUGACAGGCAGGACAUGGC | 1727 |
| 1371 | AGACCCAGAGAUUGGACCU | 77 | 1371 | AGACCCAGAGAUUGGACCU | 77 | 1389 | AGGUCCAAUCUCUGGGUCU | 1728 |
| 1389 | UGAGCAUAGUGUUGCAGAU | 78 | 1389 | UGAGCAUAGUGUUGCAGAU | 78 | 1407 | AUCUGCAACACUAUGCUCA | 1729 |
| 1407 | UUAUCACAACCACUCAAAC | 79 | 1407 | UUAUCACAACCACUCAAAC | 79 | 1425 | GUUUGAGUGGUUGUGAUAA | 1730 |
| 1425 | CAUUGAAACUCGACUCCGC | 80 | 1425 | CAUUGAAACUCGACUCCGC | 80 | 1443 | GCGGAGUCGAGUUUCAAUG | 1731 |
| 1443 | CAAGGGAGGUAGGACUAGA | 81 | 1443 | CAAGGGAGGUAGGACUAGA | 81 | 1461 | UCUAGUCCUACCUCCCUUG | 1732 |
| 1461 | AUGUUUUGGAGGCUGUGUG | 82 | 1461 | AUGUUUUGGAGGCUGUGUG | 82 | 1479 | CACACAGCCUCCAAAACAU | 1733 |
| 1479 | GUUUGCCUAUGUUGGCUGC | 83 | 1479 | GUUUGCCUAUGUUGGCUGC | 83 | 1497 | GCAGCCAACAUAGGCAAAC | 1734 |
| 1497 | CUAUAAUAAGCGUGCCUAC | 84 | 1497 | CUAUAAUAAGCGUGCCUAC | 84 | 1515 | GUAGGCACGCUUAUUAUAG | 1735 |
| 1515 | CUGGGUUCCUCGUGCUAGU | 85 | 1515 | CUGGGUUCCUCGUGCUAGU | 85 | 1533 | ACUAGCACGAGGAACCCAG | 1736 |
| 1533 | UGCUGAUAUUGGCUCAGGC | 86 | 1533 | UGCUGAUAUUGGCUCAGGC | 86 | 1551 | GCCUGAGCCAAUAUCAGCA | 1737 |
| 1551 | CCAUACUGGCAUUACUGGU | 87 | 1551 | CCAUACUGGCAUUACUGGU | 87 | 1569 | ACCAGUAAUGCCAGUAUGG | 1738 |
| 1569 | UGACAAUGUGGAGACCUUG | 88 | 1569 | UGACAAUGUGGAGACCUUG | 88 | 1587 | CAAGGUCUCCACAUUGUCA | 1739 |
| 1587 | GAAUGAGGAUCUCCUUGAG | 89 | 1587 | GAAUGAGGAUCUCCUUGAG | 89 | 1605 | CUCAAGGAGAUCCUCAUUC | 1740 |
| 1605 | GAUACUGAGUCGUGAACGU | 90 | 1605 | GAUACUGAGUCGUGAACGU | 90 | 1623 | ACGUUCACGACUCAGUAUC | 1741 |
| 1623 | UGUUAACAUUAACAUUGUU | 91 | 1623 | UGUUAACAUUAACAUUGUU | 91 | 1641 | AACAAUGUUAAUGUUAACA | 1742 |
| 1641 | UGGCGAUUUUCAUUUGAAU | 92 | 1641 | UGGCGAUUUUCAUUUGAAU | 92 | 1659 | AUUCAAAUGAAAAUCGCCA | 1743 |
| 1659 | UGAAGAGGUUGCCAUCAUU | 93 | 1659 | UGAAGAGGUUGCCAUCAUU | 93 | 1677 | AAUGAUGGCAACCUCUUCA | 1744 |
| 1677 | UUUGGCAUCUUUCUCUGCU | 94 | 1677 | UUUGGCAUCUUUCCUGCU | 94 | 1695 | AGCAGAGAAAGAUGCCAAA | 1745 |
| 1695 | UUCUACAAGUGCCUUUAUU | 95 | 1695 | UUCUACAAGUGCCUUUAUU | 95 | 1713 | AAUAAAGGCACUUGUAGAA | 1746 |
| 1713 | UGACACUAUAAAGAGUCUU | 96 | 1713 | UGACACUAUAAAGAGUCUU | 96 | 1731 | AAGACUCUUUAUAGUGUCA | 1747 |
| 1731 | UGAUUACAAGUCUUUCAAA | 97 | 1731 | UGAUUACAAGUCUUUCAAA | 97 | 1749 | UUUGAAAGACUUCUAAUCA | 1748 |
| 1749 | AACCAUUGUUGAGUCCUGC | 98 | 1749 | AACCAUUGUUGAGUCCUGC | 98 | 1767 | GCAGGACUCAACAAUGGUU | 1749 |
| 1767 | CGGUAACUAUAAAGUUACC | 99 | 1767 | CGGUAACUAUAAAGUUACC | 99 | 1785 | GGUAACUUUAUAGUUACCG | 1750 |
| 1785 | CAAGGGAAAGCCCGUAAAA | 100 | 1785 | CAAGGGAAAGCCCGUAAAA | 100 | 1803 | UUUUACGGGCUUUCCCUUG | 1751 |
| 1803 | AGGUGCUUGGAACAUUGGA | 101 | 1803 | AGGUGCUUGGAACAUUGGA | 101 | 1821 | UCCAAUGUUCCAAGCACCU | 1752 |
| 1821 | ACAACAGAGAUCAGUUUUA | 102 | 1821 | ACAACAGAGAUCAGUUUUA | 102 | 1839 | UAAAACUGAUCUCUGUUGU | 1753 |
| 1839 | AACACCACUGUGUGGUUUU | 103 | 1839 | AACACCACUGUGUGGUUUU | 103 | 1857 | AAAACCACACAGUGGUGUU | 1754 |
| 1857 | UCCCUCACAGGCUGCUGGU | 104 | 1857 | UCCCUCACAGGCUGCUGGU | 104 | 1875 | ACCAGCAGCCUGUGAGGGA | 1755 |
| 1875 | UGUUAUCAGAUCAAUUUUU | 105 | 1875 | UGUUAUCAGAUCAAUUUUU | 105 | 1893 | AAAAAUUGAUCUGAUAACA | 1756 |
| 1893 | UGCGCGCACACUUGAUGCA | 106 | 1893 | UGCGCGCACACUUGAUGCA | 106 | 1911 | UGCAUCAAGUGUGCGCGCA | 1757 |
| 1911 | AGCAAACCACUCAAUUCCU | 107 | 1911 | AGCAAACCACUCAAUUCCU | 107 | 1929 | AGGAAUUGAGUGGUUUGCU | 1758 |
| 1929 | UGAUUUGCAAAGAGCAGCU | 108 | 1929 | UGAUUUGCAAAGAGCAGCU | 108 | 1947 | AGCUGCUCUUUGCAAAUCA | 1759 |
| 1947 | UGUCACCAUACUUGAUGGU | 109 | 1947 | UGUCACCAUACUUGAUGGU | 109 | 1965 | ACCAUCAAGUAUGGUGACA | 1760 |
| 1965 | UAUUUCUGAACAGUCAUUA | 110 | 1965 | UAUUUCUGAACAGUCAUUA | 110 | 1983 | UAAUGACUGUUCAGAAAUA | 1761 |
| 1983 | ACGUCUUGUCGACGCCAUG | 111 | 1983 | ACGUCUUGUCGACGCCAUG | 111 | 2001 | CAUGGCGUCGACAAGACGU | 1762 |
| 2001 | GGUUUAUACUUCAGACCUG | 112 | 2001 | GGUUUAUACUUCAGACCUG | 112 | 2019 | CAGGUCUGAAGUAUAAACC | 1763 |
| 2019 | GCUCACCAACAGUGUCAUU | 113 | 2019 | GCUCACCAACAGUGUCAUU | 113 | 2037 | AAUGACACUGUUGGUGAGC | 1764 |
| 2037 | UAUUAUGGCAUAUGUAACU | 114 | 2037 | UAUUAUGGCAUAUGUAACU | 114 | 2055 | AGUUACAUAUGCCAUAAUA | 1765 |
| 2055 | UGGUGGUCUUGUACAACAG | 115 | 2055 | UGGUGGUCUUGUACAACAG | 115 | 2073 | CUGUUGUACAAGACCACCA | 1766 |
| 2073 | GACUUCUCAGUGGUUGUCU | 116 | 2073 | GACUUCUCAGUGGUUGUCU | 116 | 2091 | AGACAACCACUGAGAAGUC | 1767 |
| 2091 | UAAUCUUUUGGGCACUACU | 117 | 2091 | UAAUCUUUUGGGCACUACU | 117 | 2109 | AGUAGUGCCCAAAAGAUUA | 1768 |
| 2109 | UGUUGAAAAACUCAGGCCU | 118 | 2109 | UGUUGAAAAACUCAGGCCU | 118 | 2127 | AGGCCUGAGUUUUUCAACA | 1769 |
| 2127 | UAUCUUUGAAUGGAUUGAG | 119 | 2127 | UAUCUUUGAAUGGAUUGAG | 119 | 2145 | CUCAAUCCAUUCAAAGAUA | 1770 |
| 2145 | GGCGAAACUUAGUGCAGGA | 120 | 2145 | GGCGAAACUUAGUGCAGGA | 120 | 2163 | UCCUGCACUAAGUUUCGCC | 1771 |
| 2163 | AGUUGAAUUUCUCAAGGAU | 121 | 2163 | AGUUGAAUUUCUCAAGGAU | 121 | 2181 | AUCCUUGAGAAAUUCAACU | 1772 |
| 2181 | UGCUUGGGAGAUUCUCAAA | 122 | 2181 | UGCUUGGGAGAUUCUCAAA | 122 | 2199 | UUUGAGAAUCUCCCAAGCA | 1773 |
| 2199 | AUUUCUCAUUACAGGUGUU | 123 | 2199 | AUUUCUCAUUACAGGUGUU | 123 | 2217 | AACACCUGUAAUGAGAAAU | 1774 |
| 2217 | UUUUGACAUCGUCAAGGGU | 124 | 2217 | UUUUGACAUCGUCAAGGGU | 124 | 2235 | ACCCUUGACGAUGUCAAAA | 1775 |
| 2235 | UCAAAUACAGGUUGCUUCA | 125 | 2235 | UCAAAUACAGGUUGCUUCA | 125 | 2253 | UGAAGCAACCUGUAUUUGA | 1776 |
| 2253 | AGAUAACAUCAAGGAUUGU | 126 | 2253 | AGAUAACAUCAAGGAUUGU | 126 | 2271 | ACAAUCCUUGAUGUUAUCU | 1777 |
| 2271 | UGUAAAAUGCUUCAUUGAU | 127 | 2271 | UGUAAAAUGCUUCAUUGAU | 127 | 2289 | AUCAAUGAAGCAUUUUACA | 1778 |
| 2289 | UGUUGUUAACAAGGCACUC | 128 | 2289 | UGUUGUUAACAAGGCACUC | 128 | 2307 | GAGUGCCUUGUUAACAACA | 1779 |
| 2307 | CGAAAUGUGCAUUGAUCAA | 129 | 2307 | CGAAAUGUGCAUUGAUCAA | 129 | 2325 | UUGAUCAAUGCACAUUUCG | 1780 |
| 2325 | AGUCACUAUCGCUGGCGCA | 130 | 2325 | AGUCACUAUCGCUGGCGCA | 130 | 2343 | UGCGCCAGCGAUAGUGACU | 1781 |
| 2343 | AAAGUUGCGAUCACUCAAC | 131 | 2343 | AAAGUUGCGAUCACUCAAC | 131 | 2361 | GUUGAGUGAUCGCAACUUU | 1782 |
| 2361 | CUUAGGUGAAGUCUUCAUC | 132 | 2361 | CUUAGGUGAAGUCUUCAUC | 132 | 2379 | GAUGAAGACUUCACCUAAG | 1783 |
| 2379 | CGCUCAAAGCAAGGGACUU | 133 | 2379 | CGCUCAAAGCAAGGGACUU | 133 | 2397 | AAGUCCCUUGCUUUGAGCG | 1784 |
| 2397 | UUACCGUCAGUGUAUACGU | 134 | 2397 | UUACCGUCAGUGUAUACGU | 134 | 2415 | ACGUAUACACUGACGGUAA | 1785 |
| 2415 | UGGCAAGGAGCAGCUGCAA | 135 | 2415 | UGGCAAGGAGCAGCUGCAA | 135 | 2433 | UUGCAGCUGCUCCUUGCCA | 1786 |
| 2433 | ACUACUCAUGCCUCUUAAG | 136 | 2433 | ACUACUCAUGCCUCUUAAG | 136 | 2451 | CUUAAGAGGCAUGAGUAGU | 1787 |
| 2451 | GGCACCAAAAGAAGUAACC | 137 | 2451 | GGCACCAAAAGAAGUAACC | 137 | 2469 | GGUUACUUCUUUUGGUGCC | 1788 |
| 2469 | CUUUCUUGAAGGUGAUUCA | 138 | 2469 | CUUUCUUGAAGGUGAUUCA | 138 | 2487 | UGAAUCACCUUCAAGAAAG | 1789 |
| 2487 | ACAUGACACAGUACUUACC | 139 | 2487 | ACAUGACACAGUACUUACC | 139 | 2505 | GGUAAGUACUGUGUCAUGU | 1790 |
| 2505 | CUCUGAGGAGGUUGUUCUC | 140 | 2505 | CUCUGAGGAGGUUGUUCUC | 140 | 2523 | GAGAACAACCUCCUCAGAG | 1791 |
| 2523 | CAAGAACGGUGAACUCGAA | 141 | 2523 | CAAGAACGGUGAACUCGAA | 141 | 2541 | UUCGAGUUCACCGUUCUUG | 1792 |
| 2541 | AGCACUCGAGACGCCCGUU | 142 | 2541 | AGCACUCGAGACGCCCGUU | 142 | 2559 | AACGGGCGUCUCGAGUGCU | 1793 |
| 2559 | UGAUAGCUUCACAAAUGGA | 143 | 2559 | UGAUAGCUUCACAAAUGGA | 143 | 2577 | UCCAUUUGUGAAGCUAUCA | 1794 |
| 2577 | AGCUAUCGUCGGCACACCA | 144 | 2577 | AGCUAUCGUCGGCACACCA | 144 | 2595 | UGGUGUGCCGACGAUAGCU | 1795 |
| 2595 | AGUCUGUGUAAAUGGCCUC | 145 | 2595 | AGUCUGUGUAAAUGGCCUC | 145 | 2613 | GAGGCCAUUUACACAGACU | 1796 |
| 2613 | CAUGCUCUUAGAGAUUAAG | 146 | 2613 | CAUGCUCUUAGAGAUUAAG | 146 | 2631 | CUUAAUCUCUAAGAGCAUG | 1797 |
| 2631 | GGACAAAGAACAAUACUGC | 147 | 2631 | GGACAAAGAACAAUACUGC | 147 | 2649 | GCAGUAUUGUUCUUUGUCC | 1798 |
| 2649 | CGCAUUGUCUCCUGGUUUA | 148 | 2649 | CGCAUUGUCUCCUGGUUUA | 148 | 2667 | UAAACCAGGAGACAAUGCG | 1799 |
| 2667 | ACUGGCUACAAACAAUGUC | 149 | 2667 | ACUGGCUACAAACAAUGUC | 149 | 2685 | GACAUUGUUUGUAGCCAGU | 1800 |
| 2685 | CUUUCGCUUAAAAGGGGGU | 150 | 2685 | CUUUCGCUUAAAAGGGGGU | 150 | 2703 | ACCCCCUUUUAAGCGAAAG | 1801 |
| 2703 | UGCACCAAUUAAAGGUGUA | 151 | 2703 | UGCACCAAUUAAAGGUGUA | 151 | 2721 | UACACCUUUAAUUGGUGCA | 1802 |
| 2721 | AACCUUUGGAGAAGAUACU | 152 | 2721 | AACCUUUGGAGAAGAUACU | 152 | 2739 | AGUAUCUUCUCCAAAGGUU | 1803 |
| 2739 | UGUUUGGGAAGUUCAAGGU | 153 | 2739 | UGUUUGGGAAGUUCAAGGU | 153 | 2757 | ACCUUGAACUUCCCAAACA | 1804 |
| 2757 | UUACAAGAAUGUGAGAAUC | 154 | 2757 | UUACAAGAAUGUGAGAAUC | 154 | 2775 | GAUUCUCACAUUCUUGUAA | 1805 |
| 2775 | CACAUUUGAGCUUGAUGAA | 155 | 2775 | CACAUUUGAGCUUGAUGAA | 155 | 2793 | UUCAUCAAGCUCAAAUGUG | 1806 |
| 2793 | ACGUGUUGACAAAGUGCUU | 156 | 2793 | ACGUGUUGACAAAGUGCUU | 156 | 2811 | AAGCACUUUGUCAACACGU | 1807 |
| 2811 | UAAUGAAAAGUGCUCUGUC | 157 | 2811 | UAAUGAAAAGUGCUCUGUC | 157 | 2829 | GACAGAGCACUUUUCAUUA | 1808 |
| 2829 | CUACACUGUUGAAUCCGGU | 158 | 2829 | CUACACUGUUGAAUCCGGU | 158 | 2847 | ACCGGAUUCAACAGUGUAG | 1809 |
| 2847 | UACCGAAGUUACUGAGUUU | 159 | 2847 | UACCGAAGUUACUGAGUUU | 159 | 2865 | AAACUCAGUAACUUCGGUA | 1810 |
| 2865 | UGCAUGUGUUGUAGCAGAG | 160 | 2865 | UGCAUGUGUUGUAGCAGAG | 160 | 2883 | CUCUGCUACAACACAUGCA | 1811 |
| 2883 | GGCUGUUGUGAAGACUUUA | 161 | 2883 | GGCUGUUGUGAAGACUUUA | 161 | 2901 | UAAAGUCUUCACAACAGCC | 1812 |
| 2901 | ACAACCAGUUUCUGAUCUC | 162 | 2901 | ACAACCAGUUUCUGAUCUC | 162 | 2919 | GAGAUCAGAAACUGGUUGU | 1813 |
| 2919 | CCUUACCAACAUGGGUAUU | 163 | 2919 | CCUUACCAACAUGGGUAUU | 163 | 2937 | AAUACCCAUGUUGGUAAGG | 1814 |
| 2937 | UGAUCUUGAUGAGUGGAGU | 164 | 2937 | UGAUCUUGAUGAGUGGAGU | 164 | 2955 | ACUCCACUCAUCAAGAUCA | 1815 |
| 2955 | UGUAGCUACAUUCUACUUA | 165 | 2955 | UGUAGCUACAUUCUACUUA | 165 | 2973 | UAAGUAGAAUGUAGCUACA | 1816 |
| 2973 | AUUUGAUGAUGCUGGUGAA | 166 | 2973 | AUUUGAUGAUGCUGGUGAA | 166 | 2991 | UUCACCAGCAUCAUCAAAU | 1817 |
| 2991 | AGAAAACUUUUCAUCACGU | 167 | 2991 | AGAAAACUUUUCAUCACGU | 167 | 3009 | ACGUGAUGAAAAGUUUUCU | 1818 |
| 3009 | UAUGUAUUGUUCCUUUUAC | 168 | 3009 | UAUGUAUUGUUCCUUUUAC | 168 | 3027 | GUAAAAGGAACAAUACAUA | 1819 |
| 3027 | CCCUCCAGAUGAGGAAGAA | 169 | 3027 | CCCUCCAGAUGAGGAAGAA | 169 | 3045 | UUCUUCCUCAUCUGGAGGG | 1820 |
| 3045 | AGAGGACGAUGCAGAGUGU | 170 | 3045 | AGAGGACGAUGCAGAGUGU | 170 | 3063 | ACACUCUGCAUCGUCCUCU | 1821 |
| 3063 | UGAGGAAGAAGAAAUUGAU | 171 | 3063 | UGAGGAAGAAGAAAUUGAU | 171 | 3081 | AUCAAUUUCUUCUUCCUCA | 1822 |
| 3081 | UGAAACCUGUGAACAUGAG | 172 | 3081 | UGAAACCUGUGAACAUGAG | 172 | 3099 | CUCAUGUUCACAGGUUUCA | 1823 |
| 3099 | GUACGGUACAGAGGAUGAU | 173 | 3099 | GUACGGUACAGAGGAUGAU | 173 | 3117 | AUCAUCCUCUGUACCGUAC | 1824 |
| 3117 | UUAUCAAGGUCUCCCUCUG | 174 | 3117 | UUAUCAAGGUCUCCCUCUG | 174 | 3135 | CAGAGGGAGACCUUGAUAA | 1825 |
| 3135 | GGAAUUUGGUGCCUCAGCU | 175 | 3135 | GGAAUUUGGUGCCUCAGCU | 175 | 3153 | AGCUGAGGCACCAAAUUCC | 1826 |
| 3153 | UGAAACAGUUCGAGUUGAG | 176 | 3153 | UGAAACAGUUCGAGUUGAG | 176 | 3171 | CUCAACUCGAACUGUUUCA | 1827 |
| 3171 | GGAAGAAGAAGAGGAAGAC | 177 | 3171 | GGAAGAAGAAGAGGAAGAC | 177 | 3189 | GUCUUCCUCUUCUUCUUCC | 1828 |
| 3189 | CUGGCUGGAUGAUACUACU | 178 | 3189 | CUGGCUGGAUGAUACUACU | 178 | 3207 | AGUAGUAUCAUCCAGCCAG | 1829 |
| 3207 | UGAGCAAUCAGAGAUUGAG | 179 | 3207 | UGAGCAAUCAGAGAUUGAG | 179 | 3225 | CUCAAUCUCUGAUUGCUCA | 1830 |
| 3225 | GCCAGAACCAGAACCUACA | 180 | 3225 | GCCAGAACCAGAACCUACA | 180 | 3243 | UGUAGGUUCUGGUUCUGGC | 1831 |
| 3243 | ACCUGAAGAACCAGUUAAU | 181 | 3243 | ACCUGAAGAACCAGUUAAU | 181 | 3261 | AUUAACUGGUUCUUCAGGU | 1832 |
| 3261 | UCAGUUUACUGGUUAUUUA | 182 | 3261 | UCAGUUUACUGGUUAUUUA | 182 | 3279 | UAAAUAACCAGUAAACUGA | 1833 |
| 3279 | AAAACUUACUGACAAUGUU | 183 | 3279 | AAAACUUACUGACAAUGUU | 183 | 3297 | AACAUUGUCAGUAAGUUUU | 1834 |
| 3297 | UGCCAUUAAAUGUGUUGAC | 184 | 3297 | UGCCAUUAAAUGUGUUGAC | 184 | 3315 | GUCAACACAUUUAAUGGCA | 1835 |
| 3315 | CAUCGUUAAGGAGGCACAA | 185 | 3315 | CAUCGUUAAGGAGGCACAA | 185 | 3333 | UUGUGCCUCCUUAACGAUG | 1836 |
| 3333 | AAGUGCUAAUCCUAUGGUG | 186 | 3333 | AAGUGCUAAUCCUAUGGUG | 186 | 3351 | CACCAUAGGAUUAGCACUU | 1837 |
| 3351 | GAUUGUAAAUGCUGCUAAC | 187 | 3351 | GAUUGUAAAUGCUGCUAAC | 187 | 3369 | GUUAGCAGCAUUUACAAUC | 1838 |
| 3369 | CAUACACCUGAAACAUGGU | 188 | 3369 | CAUACACCUGAAACAUGGU | 188 | 3387 | ACCAUGUUUCAGGUGUAUG | 1839 |
| 3387 | UGGUGGUGUAGCAGGUGCA | 189 | 3387 | UGGUGGUGUAGCAGGUGCA | 189 | 3405 | UGCACCUGCUACACCACCA | 1840 |
| 3405 | ACUCAACAAGGCAACCAAU | 190 | 3405 | ACUCAACAAGGCAACCAAU | 190 | 3423 | AUUGGUUGCCUUGUUGAGU | 1841 |
| 3423 | UGGUGCCAUGCAAAAGGAG | 191 | 3423 | UGGUGCCAUGCAAAAGGAG | 191 | 3441 | CUCCUUUUGCAUGGCACCA | 1842 |
| 3441 | GAGUGAUGAUUACAUUAAG | 192 | 3441 | GAGUGAUGAUUACAUUAAG | 192 | 3459 | CUUAAUGUAAUCAUCACUC | 1843 |
| 3459 | GCUAAAUGGCCCUCUUACA | 193 | 3459 | GCUAAAUGGCCCUCUUACA | 193 | 3477 | UGUAAGAGGGCCAUUUAGC | 1844 |
| 3477 | AGUAGGAGGGUCUUGUUUG | 194 | 3477 | AGUAGGAGGGUCUUGUUUG | 194 | 3495 | CAAACAAGACCCUCCUACU | 1845 |
| 3495 | GCUUUCUGGACAUAAUCUU | 195 | 3495 | GCUUUCUGGACAUAAUCUU | 195 | 3513 | AAGAUUAUGUCCAGAAAGC | 1846 |
| 3513 | UGCUAAGAAGUGUCUGCAU | 196 | 3513 | UGCUAAGAAGUGUCUGCAU | 196 | 3531 | AUGCAGACACUUCUUAGCA | 1847 |
| 3531 | UGUUGUUGGACCUAACCUA | 197 | 3531 | UGUUGUUGGACCUAACCUA | 197 | 3549 | UAGGUUAGGUCCAACAACA | 1848 |
| 3549 | AAAUGCAGGUGAGGACAUC | 198 | 3549 | AAAUGCAGGUGAGGACAUC | 198 | 3567 | GAUGUCCUCACCUGCAUUU | 1849 |
| 3567 | CCAGCUUCUUAAGGCAGCA | 199 | 3567 | CCAGCUUCUUAAGGCAGCA | 199 | 3585 | UGCUGCCUUAAGAAGCUGG | 1850 |
| 3585 | AUAUGAAAAUUUCAAUUCA | 200 | 3585 | AUAUGAAAAUUUCAAUUCA | 200 | 3603 | UGAAUUGAAAUUUUCAUAU | 1851 |
| 3603 | ACAGGACAUCUUACUUGCA | 201 | 3603 | ACAGGACAUCUUACUUGCA | 201 | 3621 | UGCAAGUAAGAUGUCCUGU | 1852 |
| 3621 | ACCAUUGUUGUCAGCAGGC | 202 | 3621 | ACCAUUGUUGUCAGCAGGC | 202 | 3639 | GCCUGCUGACAACAAUGGU | 1853 |
| 3639 | CAUAUUUGGUGCUAAACCA | 203 | 3639 | CAUAUUUGGUGCUAAACCA | 203 | 3657 | UGGUUUAGCACCAAAUAUG | 1854 |
| 3657 | ACUUCAGUCUUUACAAGUG | 204 | 3657 | ACUUCAGUCUUUACAAGUG | 204 | 3675 | CACUUGUAAAGACUGAAGU | 1855 |
| 3675 | GUGCGUGCAGACGGUUCGU | 205 | 3675 | GUGCGUGCAGACGGUUCGU | 205 | 3693 | ACGAACCGUCUGCACGCAC | 1856 |
| 3693 | UACACAGGUUUAUAUUGCA | 206 | 3693 | UACACAGGUUUAUAUUGCA | 206 | 3711 | UGCAAUAUAAACCUGUGUA | 1857 |
| 3711 | AGUCAAUGACAAAGCUCUU | 207 | 3711 | AGUCAAUGACAAAGCUCUU | 207 | 3729 | AAGAGCUUUGUCAUUGACU | 1858 |
| 3729 | UUAUGAGCAGGUUGUCAUG | 208 | 3729 | UUAUGAGCAGGUUGUCAUG | 208 | 3747 | CAUGACAACCUGCUCAUAA | 1859 |
| 3747 | GGAUUAUCUUGAUAACCUG | 209 | 3747 | GGAUUAUCUUGAUAACCUG | 209 | 3765 | CAGGUUAUCAAGAUAAUCC | 1860 |
| 3765 | GAAGCCUAGAGUGGAAGCA | 210 | 3765 | GAAGCCUAGAGUGGAAGCA | 210 | 3783 | UGCUUCCACUCUAGGCUUC | 1861 |
| 3783 | ACCUAAACAAGAGGAGCCA | 211 | 3783 | ACCUAAACAAGAGGAGCCA | 211 | 3801 | UGGCUCCUCUUGUUUAGGU | 1862 |
| 3801 | ACCAAACACAGAAGAUUCC | 212 | 3801 | ACCAAACACAGAAGAUUCC | 212 | 3819 | GGAAUCUUCUGUGUUUGGU | 1863 |
| 3819 | CAAAACUGAGGAGAAAUCU | 213 | 3819 | CAAAACUGAGGAGAAAUCU | 213 | 3837 | AGAUUUCUCCUCAGUUUUG | 1864 |
| 3837 | UGUCGUACAGAAGCCUGUC | 214 | 3837 | UGUCGUACAGAAGCCUGUC | 214 | 3855 | GACAGGCUUCUGUACGACA | 1865 |
| 3855 | CGAUGUGAAGCCAAAAAUU | 215 | 3855 | CGAUGUGAAGCCAAAAAUU | 215 | 3873 | AAUUUUUGGCUUCACAUCG | 1866 |
| 3873 | UAAGGCCUGCAUUGAUGAG | 216 | 3873 | UAAGGCCUGCAUUGAUGAG | 216 | 3891 | CUCAUCAAUGCAGGCCUUA | 1867 |
| 3891 | GGUUACCACAACACUGGAA | 217 | 3891 | GGUUACCACAACACUGGAA | 217 | 3909 | UUCCAGUGUUGUGGUAACC | 1868 |
| 3909 | AGAAACUAAGUUUCUUACC | 218 | 3909 | AGAAACUAAGUUUCUUACC | 218 | 3927 | GGUAAGAAACUUAGUUUCU | 1869 |
| 3927 | CAAUAAGUUACUCUUGUUU | 219 | 3927 | CAAUAAGUUACUCUUGUUU | 219 | 3945 | AAACAAGAGUAACUUAUUG | 1870 |
| 3945 | UGCUGAUAUCAAUGGUAAG | 220 | 3945 | UGCUGAUAUCAAUGGUAAG | 220 | 3963 | CUUACCAUUGAUAUCAGCA | 1871 |
| 3963 | GCUUUACCAUGAUUCUCAG | 221 | 3963 | GCUUUACCAUGAUUCUCAG | 221 | 3981 | CUGAGAAUCAUGGUAAAGC | 1872 |
| 3981 | GAACAUGCUUAGAGGUGAA | 222 | 3981 | GAACAUGCUUAGAGGUGAA | 222 | 3999 | UUCACCUCUAAGCAUGUUC | 1873 |
| 3999 | AGAUAUGUCUUUCCUUGAG | 223 | 3999 | AGAUAUGUCUUUCCUUGAG | 223 | 4017 | CUCAAGGAAAGACAUAUCU | 1874 |
| 4017 | GAAGGAUGCACCUUACAUG | 224 | 4017 | GAAGGAUGCACCUUACAUG | 224 | 4035 | CAUGUAAGGUGCAUCCUUC | 1875 |
| 4035 | GGUAGGUGAUGUUAUCACU | 225 | 4035 | GGUAGGUGAUGUUAUCACU | 225 | 4053 | AGUGAUAACAUCACCUACC | 1876 |
| 4053 | UAGUGGUGAUAUCACUUGU | 226 | 4053 | UAGUGGUGAUAUCACUUGU | 226 | 4071 | ACAAGUGAUAUCACCACUA | 1877 |
| 4071 | UGUUGUAAUACCCUCCAAA | 227 | 4071 | UGUUGUAAUACCCUCCAAA | 227 | 4089 | UUUGGAGGGUAUUACAACA | 1878 |
| 4089 | AAAGGCUGGUGGCACUACU | 228 | 4089 | AAAGGCUGGUGGCACUACU | 228 | 4107 | AGUAGUGCCACCAGCCUUU | 1879 |
| 4107 | UGAGAUGCUCUCAAGAGCU | 229 | 4107 | UGAGAUGCUCUCAAGAGCU | 229 | 4125 | AGCUCUUGAGAGCAUCUCA | 1880 |
| 4125 | UUUGAAGAAAGUGCCAGUU | 230 | 4125 | UUUGAAGAAAGUGCCAGUU | 230 | 4143 | AACUGGCACUUUCUUCAAA | 1881 |
| 4143 | UGAUGAGUAUAUAACCACG | 231 | 4143 | UGAUGAGUAUAUAACCACG | 231 | 4161 | CGUGGUUAUAUACUCAUCA | 1882 |
| 4161 | GUACCCUGGACAAGGAUGU | 232 | 4161 | GUACCCUGGACAAGGAUGU | 232 | 4179 | ACAUCCUUGUCCAGGGUAC | 1883 |
| 4179 | UGCUGGUUAUACACUUGAG | 233 | 4179 | UGCUGGUUAUACACUUGAG | 233 | 4197 | CUCAAGUGUAUAACCAGCA | 1884 |
| 4197 | GGAAGCUAAGACUGCUCUU | 234 | 4197 | GGAAGCUAAGACUGCUCUU | 234 | 4215 | AAGAGCAGUCUUAGCUUCC | 1885 |
| 4215 | UAAGAAAUGCAAAUCUGCA | 235 | 4215 | UAAGAAAUGCAAAUCUGCA | 235 | 4233 | UGCAGAUUUGCAUUUCUUA | 1886 |
| 4233 | AUUUUAUGUACUACCUUCA | 236 | 4233 | AUUUUAUGUACUACCUUCA | 236 | 4251 | UGAAGGUAGUACAUAAAAU | 1887 |
| 4251 | AGAAGCACCUAAUGCUAAG | 237 | 4251 | AGAAGCACCUAAUGCUAAG | 237 | 4269 | CUUAGCAUUAGGUGCUUCU | 1888 |
| 4269 | GGAAGAGAUUCUAGGAACU | 238 | 4269 | GGAAGAGAUUCUAGGAACU | 238 | 4287 | AGUUCCUAGAAUCUCUUCC | 1889 |
| 4287 | UGUAUCCUGGAAUUUGAGA | 239 | 4287 | UGUAUCCUGGAAUUUGAGA | 239 | 4305 | UCUCAAAUUCCAGGAUACA | 1890 |
| 4305 | AGAAAUGCUUGCUCAUGCU | 240 | 4305 | AGAAAUGCUUGCUCAUGCU | 240 | 4323 | AGCAUGAGCAAGCAUUUCU | 1891 |
| 4323 | UGAAGAGACAAGAAAAUUA | 241 | 4323 | UGAAGAGACAAGAAAAUUA | 241 | 4341 | UAAUUUUCUUGUCUCUUCA | 1892 |
| 4341 | AAUGCCUAUAUGCAUGGAU | 242 | 4341 | AAUGCCUAUAUGCAUGGAU | 242 | 4359 | AUCCAUGCAUAUAGGCAUU | 1893 |
| 4359 | UGUUAGAGCCAUAAUGGCA | 243 | 4359 | UGUUAGAGCCAUAAUGGCA | 243 | 4377 | UGCCAUUAUGGCUCUAACA | 1894 |
| 4377 | AACCAUCCAACGUAAGUAU | 244 | 4377 | AACCAUCCAACGUAAGUAU | 244 | 4395 | AUACUUACGUUGGAUGGUU | 1895 |
| 4395 | UAAAGGAAUUAAAAUUCAA | 245 | 4395 | UAAAGGAAUUAAAAUUCAA | 245 | 4413 | UUGAAUUUUAAUUCCUUUA | 1896 |
| 4413 | AGAGGGCAUCGUUGACUAU | 246 | 4413 | AGAGGGCAUCGUUGACUAU | 246 | 4431 | AUAGUCAACGAUGCCCUCU | 1897 |
| 4431 | UGGUGUCCGAUUCUUCUUU | 247 | 4431 | UGGUGUCCGAUUCUUCUUU | 247 | 4449 | AAAGAAGAAUCGGACACCA | 1898 |
| 4449 | UUAUACUAGUAAAGAGCCU | 248 | 4449 | UUAUACUAGUAAAGAGCCU | 248 | 4467 | AGGCUCUUUACUAGUAUAA | 1899 |
| 4467 | UGUAGCUUCUAUUAUUACG | 249 | 4467 | UGUAGCUUCUAUUAUUACG | 249 | 4485 | CGUAAUAAUAGAAGCUACA | 1900 |
| 4485 | GAAGCUGAACUCUCUAAAU | 250 | 4485 | GAAGCUGAACUCUCUAAAU | 250 | 4503 | AUUUAGAGAGUUCAGCUUC | 1901 |
| 4503 | UGAGCCGCUUGUCACAAUG | 251 | 4503 | UGAGCCGCUUGUCACAAUG | 251 | 4521 | CAUUGUGACAAGCGGCUCA | 1902 |
| 4521 | GCCAAUUGGUUAUGUGACA | 252 | 4521 | GCCAAUUGGUUAUGUGACA | 252 | 4539 | UGUCACAUAACCAAUUGGC | 1903 |
| 4539 | ACAUGGUUUUAAUCUUGAA | 253 | 4539 | ACAUGGUUUUAAUCUUGAA | 253 | 4557 | UUCAAGAUUAAAACCAUGU | 1904 |
| 4557 | AGAGGCUGCGCGCUGUAUG | 254 | 4557 | AGAGGCUGCGCGCUGUAUG | 254 | 4575 | CAUACAGCGCGCAGCCUCU | 1905 |
| 4575 | GCGUUCUCUUAAAGCUCCU | 255 | 4575 | GCGUUCUCUUAAAGCUCCU | 255 | 4593 | AGGAGCUUUAAGAGAACGC | 1906 |
| 4593 | UGCCGUAGUGUCAGUAUCA | 256 | 4593 | UGCCGUAGUGUCAGUAUCA | 256 | 4611 | UGAUACUGACACUACGGCA | 1907 |
| 4611 | AUCACCAGAUGCUGUUACU | 257 | 4611 | AUCACCAGAUGCUGUUACU | 257 | 4629 | AGUAACAGCAUCUGGUGAU | 1908 |
| 4629 | UACAUAUAAUGGAUACCUC | 258 | 4629 | UACAUAUAAUGGAUACCUC | 258 | 4647 | GAGGUAUCCAUUAUAUGUA | 1909 |
| 4647 | CACUUCGUCAUCAAAGACA | 259 | 4647 | CACUUCGUCAUCAAAGACA | 259 | 4665 | UGUCUUUGAUGACGAAGUG | 1910 |
| 4665 | AUCUGAGGAGCACUUUGUA | 260 | 4665 | AUCUGAGGAGCACUUUGUA | 260 | 4683 | UACAAAGUGCUCCUCAGAU | 1911 |
| 4683 | AGAAACAGUUUCUUUGGCU | 261 | 4683 | AGAAACAGUUUCUUUGGCU | 261 | 4701 | AGCCAAAGAAACUGUUUCU | 1912 |
| 4701 | UGGCUCUUACAGAGAUUGG | 262 | 4701 | UGGCUCUUACAGAGAUUGG | 262 | 4719 | CCAAUCUCUGUAAGAGCCA | 1913 |
| 4719 | GUCCUAUUCAGGACAGCGU | 263 | 4719 | GUCCUAUUCAGGACAGCGU | 263 | 4737 | ACGCUGUCCUGAAUAGGAC | 1914 |
| 4737 | UACAGAGUUAGGUGUUGAA | 264 | 4737 | UACAGAGUUAGGUGUUGAA | 264 | 4755 | UUCAACACCUAACUCUGUA | 1915 |
| 4755 | AUUUCUUAAGCGUGGUGAC | 265 | 4755 | AUUUCUUAAGCGUGGUGAC | 265 | 4773 | GUCACCACGCUUAAGAAAU | 1916 |
| 4773 | CAAAAUUGUGUACCACACU | 266 | 4773 | CAAAAUUGUGUACCACACU | 266 | 4791 | AGUGUGGUACACAAUUUUG | 1917 |
| 4791 | UCUGGAGAGCCCCGUCGAG | 267 | 4791 | UCUGGAGAGCCCCGUCGAG | 267 | 4809 | CUCGACGGGGCUCUCCAGA | 1918 |
| 4809 | GUUUCAUCUUGACGGUGAG | 268 | 4809 | GUUUCAUCUUGACGGUGAG | 268 | 4827 | CUCACCGUCAAGAUGAAAC | 1919 |
| 4827 | GGUUCUUUCACUUGACAAA | 269 | 4827 | GGUUCUUUCACUUGACAAA | 269 | 4845 | UUUGUCAAGUGAAAGAACC | 1920 |
| 4845 | ACUAAAGAGUCUCUUAUCC | 270 | 4845 | ACUAAAGAGUCUCUUAUCC | 270 | 4863 | GGAUAAGAGACUCUUUAGU | 1921 |
| 4863 | CCUGCGGGAGGUUAAGACU | 271 | 4863 | CCUGCGGGAGGUUAAGACU | 271 | 4881 | AGUCUUAACCUCCCGCAGG | 1922 |
| 4881 | UAUAAAAGUGUUCACAACU | 272 | 4881 | UAUAAAAGUGUUCACAACU | 272 | 4899 | AGUUGUGAACACUUUUAUA | 1923 |
| 4899 | UGUGGACAACACUAAUCUC | 273 | 4899 | UGUGGACAACACUAAUCUC | 273 | 4917 | GAGAUUAGUGUUGUCCACA | 1924 |
| 4917 | CCACACACAGCUUGUGGAU | 274 | 4917 | CCACACACAGCUUGUGGAU | 274 | 4935 | AUCCACAAGCUGUGUGUGG | 1925 |
| 4935 | UAUGUCUAUGACAUAUGGA | 275 | 4935 | UAUGUCUAUGACAUAUGGA | 275 | 4953 | UCCAUAUGUCAUAGACAUA | 1926 |
| 4953 | ACAGCAGUUUGGUCCAACA | 276 | 4953 | ACAGCAGUUUGGUCCAACA | 276 | 4971 | UGUUGGACCAAACUGCUGU | 1927 |
| 4971 | AUACUUGGAUGGUGCUGAU | 277 | 4971 | AUACUUGGAUGGUGCUGAU | 277 | 4989 | AUCAGCACCAUCCAAGUAU | 1928 |
| 4989 | UGUUACAAAAAUUAAACCU | 278 | 4989 | UGUUACAAAAAUUAAACCU | 278 | 5007 | AGGUUUAAUUUUUGUAACA | 1929 |
| 5007 | UCAUGUAAAUCAUGAGGGU | 279 | 5007 | UCAUGUAAAUCAUGAGGGU | 279 | 5025 | ACCCUCAUGAUUUACAUGA | 1930 |
| 5025 | UAAGACUUUCUUUGUACUA | 280 | 5025 | UAAGACUUUCUUUGUACUA | 280 | 5043 | UAGUACAAAGAAAGUCUUA | 1931 |
| 5043 | ACCUAGUGAUGACACACUA | 281 | 5043 | ACCUAGUGAUGACACACUA | 281 | 5061 | UAGUGUGUCAUCACUAGGU | 1932 |
| 5061 | ACGUAGUGAAGCUUUCGAG | 282 | 5061 | ACGUAGUGAAGCUUUCGAG | 282 | 5079 | CUCGAAAGCUUCACUACGU | 1933 |
| 5079 | GUACUACCAUACUCUUGAU | 283 | 5079 | GUACUACCAUACUCUUGAU | 283 | 5097 | AUCAAGAGUAUGGUAGUAC | 1934 |
| 5097 | UGAGAGUUUUCUUGGUAGG | 284 | 5097 | UGAGAGUUUUCUUGGUAGG | 284 | 5115 | CCUACCAAGAAAACUCUCA | 1935 |
| 5115 | GUACAUGUCUGCUUUAAAC | 285 | 5115 | GUACAUGUCUGCUUUAAAC | 285 | 5133 | GUUUAAAGCAGACAUGUAC | 1936 |
| 5133 | CCACACAAAGAAAUGGAAA | 286 | 5133 | CCACACAAAGAAAUGGAAA | 286 | 5151 | UUUCCAUUUCUUUGUGUGG | 1937 |
| 5151 | AUUUCCUCAAGUUGGUGGU | 287 | 5151 | AUUUCCUCAAGUUGGUGGU | 287 | 5169 | ACCACCAACUUGAGGAAAU | 1938 |
| 5169 | UUUAACUUCAAUUAAAUGG | 288 | 5169 | UUUAACUUCAAUUAAAUGG | 288 | 5187 | CCAUUUAAUUGAAGUUAAA | 1939 |
| 5187 | GGCUGAUAACAAUUGUUAU | 289 | 5187 | GGCUGAUAACAAUUGUUAU | 289 | 5205 | AUAACAAUUGUUAUCAGCC | 1940 |
| 5205 | UUUGUCUAGUGUUUUAUUA | 290 | 5205 | UUUGUCUAGUGUUUUAUUA | 290 | 5223 | UAAUAAAACACUAGACAAA | 1941 |
| 5223 | AGCACUUCAACAGCUUGAA | 291 | 5223 | AGCACUUCAACAGCUUGAA | 291 | 5241 | UUCAAGCUGUUGAAGUGCU | 1942 |
| 5241 | AGUCAAAUUCAAUGCACCA | 292 | 5241 | AGUCAAAUUCAAUGCACCA | 292 | 5259 | UGGUGCAUUGAAUUUGACU | 1943 |
| 5259 | AGCACUUCAAGAGGCUUAU | 293 | 5259 | AGCACUUCAAGAGGCUUAU | 293 | 5277 | AUAAGCCUCUUGAAGUGCU | 1944 |
| 5277 | UUAUAGAGCCCGUGCUGGU | 294 | 5277 | UUAUAGAGCCCGUGCUGGU | 294 | 5295 | ACCAGCACGGGCUCUAUAA | 1945 |
| 5295 | UGAUGCUGCUAACUUUUGU | 295 | 5295 | UGAUGCUGCUAACUUUUGU | 295 | 5313 | ACAAAAGUUAGCAGCAUCA | 1946 |
| 5313 | UGCACUCAUACUCGCUUAC | 296 | 5313 | UGCACUCAUACUCGCUUAC | 296 | 5331 | GUAAGCGAGUAUGAGUGCA | 1947 |
| 5331 | CAGUAAUAAAACUGUUGGC | 297 | 5331 | CAGUAAUAAAACUGUUGGC | 297 | 5349 | GCCAACAGUUUUAUUACUG | 1948 |
| 5349 | CGAGCUUGGUGAUGUCAGA | 298 | 5349 | CGAGCUUGGUGAUGUCAGA | 298 | 5367 | UCUGACAUCACCAAGCUCG | 1949 |
| 5367 | AGAAACUAUGACCCAUCUU | 299 | 5367 | AGAAACUAUGACCCAUCUU | 299 | 5385 | AAGAUGGGUCAUAGUUUCU | 1950 |
| 5385 | UCUACAGCAUGCUAAUUUG | 300 | 5385 | UCUACAGCAUGCUAAUUUG | 300 | 5403 | CAAAUUAGCAUGCUGUAGA | 1951 |
| 5403 | GGAAUCUGCAAAGCGAGUU | 301 | 5403 | GGAAUCUGCAAAGCGAGUU | 301 | 5421 | AACUCGCUUUGCAGAUUCC | 1952 |
| 5421 | UCUUAAUGUGGUGUGUAAA | 302 | 5421 | UCUUAAUGUGGUGUGUAAA | 302 | 5439 | UUUACACACCACAUUAAGA | 1953 |
| 5439 | ACAUUGUGGUCAGAAAACU | 303 | 5439 | ACAUUGUGGUCAGAAAACU | 303 | 5457 | AGUUUUCUGACCACAAUGU | 1954 |
| 5457 | UACUACCUUAACGGGUGUA | 304 | 5457 | UACUACCUUAACGGGUGUA | 304 | 5475 | UACACCCGUUAAGGUAGUA | 1955 |
| 5475 | AGAAGCUGUGAUGUAUAUG | 305 | 5475 | AGAAGCUGUGAUGUAUAUG | 305 | 5493 | CAUAUACAUCACAGCUUCU | 1956 |
| 5493 | GGGUACUCUAUCUUAUGAU | 306 | 5493 | GGGUACUCUAUCUUAUGAU | 306 | 5511 | AUCAUAAGAUAGAGUACCC | 1957 |
| 5511 | UAAUCUUAAGACAGGUGUU | 307 | 5511 | UAAUCUUAAGACAGGUGUU | 307 | 5529 | AACACCUGUCUUAAGAUUA | 1958 |
| 5529 | UUCCAUUCCAUGUGUGUGU | 308 | 5529 | UUCCAUUCCAUGUGUGUGU | 308 | 5547 | ACACACACAUGGAAUGGAA | 1959 |
| 5547 | UGGUCGUGAUGCUACACAA | 309 | 5547 | UGGUCGUGAUGCUACACAA | 309 | 5565 | UUGUGUAGCAUCACGACCA | 1960 |
| 5565 | AUAUCUAGUACAACAAGAG | 310 | 5565 | AUAUCUAGUACAACAAGAG | 310 | 5583 | CUCUUGUUGUACUAGAUAU | 1961 |
| 5583 | GUCUUCUUUUGUUAUGAUG | 311 | 5583 | GUCUUCUUUUGUUAUGAUG | 311 | 5601 | CAUCAUAACAAAAGAAGAC | 1962 |
| 5601 | GUCUGCACCACCUGCUGAG | 312 | 5601 | GUCUGCACCACCUGCUGAG | 312 | 5619 | CUCAGCAGGUGGUGCAGAC | 1963 |
| 5619 | GUAUAAAUUACAGCAAGGU | 313 | 5619 | GUAUAAAUUACAGCAAGGU | 313 | 5637 | ACCUUGCUGUAAUUUAUAC | 1964 |
| 5637 | UACAUUCUUAUGUGCGAAU | 314 | 5637 | UACAUUCUUAUGUGCGAAU | 314 | 5655 | AUUCGCACAUAAGAAUGUA | 1965 |
| 5655 | UGAGUACACUGGUAACUAU | 315 | 5655 | UGAGUACACUGGUAACUAU | 315 | 5673 | AUAGUUACCAGUGUACUCA | 1966 |
| 5673 | UCAGUGUGGUCAUUACACU | 316 | 5673 | UCAGUGUGGUCAUUACACU | 316 | 5691 | AGUGUAAUGACCACACUGA | 1967 |
| 5691 | UCAUAUAACUGCUAAGGAG | 317 | 5691 | UCAUAUAACUGCUAAGGAG | 317 | 5709 | CUCCUUAGCAGUUAUAUGA | 1968 |
| 5709 | GACCCUCUAUCGUAUUGAC | 318 | 5709 | GACCCUCUAUCGUAUUGAC | 318 | 5727 | GUCAAUACGAUAGAGGGUC | 1969 |
| 5727 | CGGAGCUCACCUUACAAAG | 319 | 5727 | CGGAGCUCACCUUACAAAG | 319 | 5745 | CUUUGUAAGGUGAGCUCCG | 1970 |
| 5745 | GAUGUCAGAGUACAAAGGA | 320 | 5745 | GAUGUCAGAGUACAAAGGA | 320 | 5763 | UCCUUUGUACUCUGACAUC | 1971 |
| 5763 | ACCAGUGACUGAUGUUUUC | 321 | 5763 | ACCAGUGACUGAUGUUUUC | 321 | 5781 | GAAAACAUCAGUCACUGGU | 1972 |
| 5781 | CUACAAGGAAACAUCUUAC | 322 | 5781 | CUACAAGGAAACAUCUUAC | 322 | 5799 | GUAAGAUGUUUCCUUGUAG | 1973 |
| 5799 | CACUACAACCAUCAAGCCU | 323 | 5799 | CACUACAACCAUCAAGCCU | 323 | 5817 | AGGCUUGAUGGUUGUAGUG | 1974 |
| 5817 | UGUGUCGUAUAAACUCGAU | 324 | 5817 | UGUGUCGUAUAAACUCGAU | 324 | 5835 | AUCGAGUUUAUACGACACA | 1975 |
| 5835 | UGGAGUUACUUACACAGAG | 325 | 5835 | UGGAGUUACUUACACAGAG | 325 | 5853 | CUCUGUGUAAGUAACUCCA | 1976 |
| 5853 | GAUUGAACCAAAAUUGGAU | 326 | 5853 | GAUUGAACCAAAAUUGGAU | 326 | 5871 | AUCCAAUUUUGGUUCAAUC | 1977 |
| 5871 | UGGGUAUUAUAAAAAGGAU | 327 | 5871 | UGGGUAUUAUAAAAAGGAU | 327 | 5889 | AUCCUUUUUAUAAUACCCA | 1978 |
| 5889 | UAAUGCUUACUAUACAGAG | 328 | 5889 | UAAUGCUUACUAUACAGAG | 328 | 5907 | CUCUGUAUAGUAAGCAUUA | 1979 |
| 5907 | GCAGCCUAUAGACCUUGUA | 329 | 5907 | GCAGCCUAUAGACCUUGUA | 329 | 5925 | UACAAGGUCUAUAGGCUGC | 1980 |
| 5925 | ACCAACUCAACCAUUACCA | 330 | 5925 | ACCAACUCAACCAUUACCA | 330 | 5943 | UGGUAAUGGUUGAGUUGGU | 1981 |
| 5943 | AAAUGCGAGUUUUGAUAAU | 331 | 5943 | AAAUGCGAGUUUUGAUAAU | 331 | 5961 | AUUAUCAAAACUCGCAUUU | 1982 |
| 5961 | UUUCAAACUCACAUGUUCU | 332 | 5961 | UUUCAAACUCACAUGUUCU | 332 | 5979 | AGAACAUGUGAGUUUGAAA | 1983 |
| 5979 | UAACACAAAAUUUGCUGAU | 333 | 5979 | UAACACAAAAUUUGCUGAU | 333 | 5997 | AUCAGCAAAUUUUGUGUUA | 1984 |
| 5997 | UGAUUUAAAUCAAAUGACA | 334 | 5997 | UGAUUUAAAUCAAAUGACA | 334 | 6015 | UGUCAUUUGAUUUAAAUCA | 1985 |
| 6015 | AGGCUUCACAAAGCCAGCU | 335 | 6015 | AGGCUUCACAAAGCCAGCU | 335 | 6033 | AGCUGGCUUUGUGAAGCCU | 1986 |
| 6033 | UUCACGAGAGCUAUCUGUC | 336 | 6033 | UUCACGAGAGCUAUCUGUC | 336 | 6051 | GACAGAUAGCUCUCGUGAA | 1987 |
| 6051 | CACAUUCUUCCCAGACUUG | 337 | 6051 | CACAUUCUUCCCAGACUUG | 337 | 6069 | CAAGUCUGGGAAGAAUGUG | 1988 |
| 6069 | GAAUGGCGAUGUAGUGGCU | 338 | 6069 | GAAUGGCGAUGUAGUGGCU | 338 | 6087 | AGCCACUACAUCGCCAUUC | 1989 |
| 6087 | UAUUGACUAUAGACACUAU | 339 | 6087 | UAUUGACUAUAGACACUAU | 339 | 6105 | AUAGUGUCUAUAGUCAAUA | 1990 |
| 6105 | UUCAGCGAGUUUCAAGAAA | 340 | 6105 | UUCAGCGAGUUUCAAGAAA | 340 | 6123 | UUUCUUGAAACUCGCUGAA | 1991 |
| 6123 | AGGUGCUAAAUUACUGCAU | 341 | 6123 | AGGUGCUAAAUUACUGCAU | 341 | 6141 | AUGCAGUAAUUUAGCACCU | 1992 |
| 6141 | UAAGCCAAUUGUUUGGCAC | 342 | 6141 | UAAGCCAAUUGUUUGGCAC | 342 | 6159 | GUGCCAAACAAUUGGCUUA | 1993 |
| 6159 | CAUUAACCAGGCUACAACC | 343 | 6159 | CAUUAACCAGGCUACAACC | 343 | 6177 | GGUUGUAGCCUGGUUAAUG | 1994 |
| 6177 | CAAGACAACGUUCAAACCA | 344 | 6177 | CAAGACAACGUUCAAACCA | 344 | 6195 | UGGUUUGAACGUUGUCUUG | 1995 |
| 6195 | AAACACUUGGUGUUUACGU | 345 | 6195 | AAACACUUGGUGUUUACGU | 345 | 6213 | ACGUAAACACCAAGUGUUU | 1996 |
| 6213 | UUGUCUUUGGAGUACAAAG | 346 | 6213 | UUGUCUUUGGAGUACAAAG | 346 | 6231 | CUUUGUACUCCAAAGACAA | 1997 |
| 6231 | GCCAGUAGAUACUUCAAAU | 347 | 6231 | GCCAGUAGAUACUUCAAAU | 347 | 6249 | AUUUGAAGUAUCUACUGGC | 1998 |
| 6249 | UUCAUUUGAAGUUCUGGCA | 348 | 6249 | UUCAUUUGAAGUUCUGGCA | 348 | 6267 | UGCCAGAACUUCAAAUGAA | 1999 |
| 6267 | AGUAGAAGACACACAAGGA | 349 | 6267 | AGUAGAAGACACACAAGGA | 349 | 6285 | UCCUUGUGUGUCUUCUACU | 2000 |
| 6285 | AAUGGACAAUCUUGCUUGU | 350 | 6285 | AAUGGACAAUCUUGCUUGU | 350 | 6303 | ACAAGCAAGAUUGUCCAUU | 2001 |
| 6303 | UGAAAGUCAACAACCCACC | 351 | 6303 | UGAAAGUCAACAACCCACC | 351 | 6321 | GGUGGGUUGUUGACUUUCA | 2002 |
| 6321 | CUCUGAAGAAGUAGUGGAA | 352 | 6321 | CUCUGAAGAAGUAGUGGAA | 352 | 6339 | UUCCACUACUUCUUCAGAG | 2003 |
| 6339 | AAAUCCUACCAUACAGAAG | 353 | 6339 | AAAUCCUACCAUACAGAAG | 353 | 6357 | CUUCUGUAUGGUAGGAUUU | 2004 |
| 6357 | GGAAGUCAUAGAGUGUGAC | 354 | 6357 | GGAAGUCAUAGAGUGUGAC | 354 | 6375 | GUCACACUCUAUGACUUCC | 2005 |
| 6375 | CGUGAAAACUACCGAAGUU | 355 | 6375 | CGUGAAAACUACCGAAGUU | 355 | 6393 | AACUUCGGUAGUUUUCACG | 2006 |
| 6393 | UGUAGGCAAUGUCAUACUU | 356 | 6393 | UGUAGGCAAUGUCAUACUU | 356 | 6411 | AAGUAUGACAUUGCCUACA | 2007 |
| 6411 | UAAACCAUCAGAUGAAGGU | 357 | 6411 | UAAACCAUCAGAUGAAGGU | 357 | 6429 | ACCUUCAUCUGAUGGUUUA | 2008 |
| 6429 | UGUUAAAGUAACACAAGAG | 358 | 6429 | UGUUAAAGUAACACAAGAG | 358 | 6447 | CUCUUGUGUUACUUUAACA | 2009 |
| 6447 | GUUAGGUCAUGAGGAUCUU | 359 | 6447 | GUUAGGUCAUGAGGAUCUU | 359 | 6465 | AAGAUCCUCAUGACCUAAC | 2010 |
| 6465 | UAUGGCUGCUUAUGUGGAA | 360 | 6465 | UAUGGCUGCUUAUGUGGAA | 360 | 6483 | UUCCACAUAAGCAGCCAUA | 2011 |
| 6483 | AAACACAAGCAUUACCAUU | 361 | 6483 | AAACACAAGCAUUACCAUU | 361 | 6501 | AAUGGUAAUGCUUGUGUUU | 2012 |
| 6501 | UAAGAAACCUAAUGAGCUU | 362 | 6501 | UAAGAAACCUAAUGAGCUU | 362 | 6519 | AAGCUCAUUAGGUUUCUUA | 2013 |
| 6519 | UUCACUAGCCUUAGGUUUA | 363 | 6519 | UUCACUAGCCUUAGGUUUA | 363 | 6537 | UAAACCUAAGGCUAGUGAA | 2014 |
| 6537 | AAAAACAAUUGCCACUCAU | 364 | 6537 | AAAAACAAUUGCCACUCAU | 364 | 6555 | AUGAGUGGCAAUUGUUUUU | 2015 |
| 6555 | UGGUAUUGCUGCAAUUAAU | 365 | 6555 | UGGUAUUGCUGCAAUUAAU | 365 | 6573 | AUUAAUUGCAGCAAUACCA | 2016 |
| 6573 | UAGUGUUCCUUGGAGUAAA | 366 | 6573 | UAGUGUUCCUUGGAGUAAA | 366 | 6591 | UUUACUCCAAGGAACACUA | 2017 |
| 6591 | AAUUUUGGCUUAUGUCAAA | 367 | 6591 | AAUUUUGGCUUAUGUCAAA | 367 | 6609 | UUUGACAUAAGCCAAAAUU | 2018 |
| 6609 | ACCAUUCUUAGGACAAGCA | 368 | 6609 | ACCAUUCUUAGGACAAGCA | 368 | 6627 | UGCUUGUCCUAAGAAUGGU | 2019 |
| 6627 | AGCAAUUACAACAUCAAAU | 369 | 6627 | AGCAAUUACAACAUCAAAU | 369 | 6645 | AUUUGAUGUUGUAAUUGCU | 2020 |
| 6645 | UUGCGCUAAGAGAUUAGCA | 370 | 6645 | UUGCGCUAAGAGAUUAGCA | 370 | 6663 | UGCUAAUCUCUUAGCGCAA | 2021 |
| 6663 | ACAACGUGUGUUUAACAAU | 371 | 6663 | ACAACGUGUGUUUAACAAU | 371 | 6681 | AUUGUUAAACACACGUUGU | 2022 |
| 6681 | UUAUAUGCCUUAUGUGUUU | 372 | 6681 | UUAUAUGCCUUAUGUGUUU | 372 | 6699 | AAACACAUAAGGCAUAUAA | 2023 |
| 6699 | UACAUUAUUGUUCCAAUUG | 373 | 6699 | UACAUUAUUGUUCCAAUUG | 373 | 6717 | CAAUUGGAACAAUAAUGUA | 2024 |
| 6717 | GUGUACUUUUACUAAAAGU | 374 | 6717 | GUGUACUUUUACUAAAAGU | 374 | 6735 | ACUUUUAGUAAAAGUACAC | 2025 |
| 6735 | UACCAAUUCUAGAAUUAGA | 375 | 6735 | UACCAAUUCUAGAAUUAGA | 375 | 6753 | UCUAAUUCUAGAAUUGGUA | 2026 |
| 6753 | AGCUUCACUACCUACAACU | 376 | 6753 | AGCUUCACUACCUACAACU | 376 | 6771 | AGUUGUAGGUAGUGAAGCU | 2027 |
| 6771 | UAUUGCUAAAAAUAGUGUU | 377 | 6771 | UAUUGCUAAAAAUAGUGUU | 377 | 6789 | AACACUAUUUUUAGCAAUA | 2028 |
| 6789 | UAAGAGUGUUGCUAAAUUA | 378 | 6789 | UAAGAGUGUUGCUAAAUUA | 378 | 6807 | UAAUUUAGCAACACUCUUA | 2029 |
| 6807 | AUGUUUGGAUGCCGGCAUU | 379 | 6807 | AUGUUUGGAUGCCGGCAUU | 379 | 6825 | AAUGCCGGCAUCCAAACAU | 2030 |
| 6825 | UAAUUAUGUGAAGUCACCC | 380 | 6825 | UAAUUAUGUGAAGUCACCC | 380 | 6843 | GGGUGACUUCACAUAAUUA | 2031 |
| 6843 | CAAAUUUUCUAAAUUGUUC | 381 | 6843 | CAAAUUUUCUAAAUUGUUC | 381 | 6861 | GAACAAUUUAGAAAAUUUG | 2032 |
| 6861 | CACAAUCGCUAUGUGGCUA | 382 | 6861 | CACAAUCGCUAUGUGGCUA | 382 | 6879 | UAGCCACAUAGCGAUUGUG | 2033 |
| 6879 | AUUGUUGUUAAGUAUUUGC | 383 | 6879 | AUUGUUGUUAAGUAUUUGC | 383 | 6897 | GCAAAUACUUAACAACAAU | 2034 |
| 6897 | CUUAGGUUCUCUAAUCUGU | 384 | 6897 | CUUAGGUUCUCUAAUCUGU | 384 | 6915 | ACAGAUUAGAGAACCUAAG | 2035 |
| 6915 | UGUAACUGCUGCUUUUGGU | 385 | 6915 | UGUAACUGCUGCUUUUGGU | 385 | 6933 | ACCAAAAGCAGCAGUUACA | 2036 |
| 6933 | UGUACUCUUAUCUAAUUUU | 386 | 6933 | UGUACUCUUAUCUAAUUUU | 386 | 6951 | AAAAUUAGAUAAGAGUACA | 2037 |
| 6951 | UGGUGCUCCUUCUUAUUGU | 387 | 6951 | UGGUGCUCCUUCUUAUUGU | 387 | 6969 | ACAAUAAGAAGGAGCACCA | 2038 |
| 6969 | UAAUGGCGUUAGAGAAUUG | 388 | 6969 | UAAUGGCGUUAGAGAAUUG | 388 | 6987 | CAAUUCUCUAACGCCAUUA | 2039 |
| 6987 | GUAUCUUAAUUCGUCUAAC | 389 | 6987 | GUAUCUUAAUUCGUCUAAC | 389 | 7005 | GUUAGACGAAUUAAGAUAC | 2040 |
| 7005 | CGUUACUACUAUGGAUUUC | 390 | 7005 | CGUUACUACUAUGGAUUUC | 390 | 7023 | GAAAUCCAUAGUAGUAACG | 2041 |
| 7023 | CUGUGAAGGUUCUUUUCCU | 391 | 7023 | CUGUGAAGGUUCUUUUCCU | 391 | 7041 | AGGAAAAGAACCUUCACAG | 2042 |
| 7041 | UUGCAGCAUUUGUUUAAGU | 392 | 7041 | UUGCAGCAUUUGUUUAAGU | 392 | 7059 | ACUUAAACAAAUGCUGCAA | 2043 |
| 7059 | UGGAUUAGACUCCCUUGAU | 393 | 7059 | UGGAUUAGACUCCCUUGAU | 393 | 7077 | AUCAAGGGAGUCUAAUCCA | 2044 |
| 7077 | UUCUUAUCCAGCUCUUGAA | 394 | 7077 | UUCUUAUCCAGCUCUUGAA | 394 | 7095 | UUCAAGAGCUGGAUAAGAA | 2045 |
| 7095 | AACCAUUCAGGUGACGAUU | 395 | 7095 | AACCAUUCAGGUGACGAUU | 395 | 7113 | AAUCGUCACCUGAAUGGUU | 2046 |
| 7113 | UUCAUCGUACAAGCUAGAC | 396 | 7113 | UUCAUCGUACAAGCUAGAC | 396 | 7131 | GUCUAGCUUGUACGAUGAA | 2047 |
| 7131 | CUUGACAAUUUUAGGUCUG | 397 | 7131 | CUUGACAAUUUUAGGUCUG | 397 | 7149 | CAGACCUAAAAUUGUCAAG | 2048 |
| 7149 | GGCCGCUGAGUGGGUUUUG | 398 | 7149 | GGCCGCUGAGUGGGUUUUG | 398 | 7167 | CAAAACCCACUCAGCGGCC | 2049 |
| 7167 | GGCAUAUAUGUUGUUCACA | 399 | 7167 | GGCAUAUAUGUUGUUCACA | 399 | 7185 | UGUGAACAACAUAUAUGCC | 2050 |
| 7185 | AAAAUUCUUUUAUUUAUUA | 400 | 7185 | AAAAUUCUUUUAUUUAUUA | 400 | 7203 | UAAUAAAUAAAAGAAUUUU | 2051 |
| 7203 | AGGUCUUUCAGCUAUAAUG | 401 | 7203 | AGGUCUUUCAGCUAUAAUG | 401 | 7221 | CAUUAUAGCUGAAAGACCU | 2052 |
| 7221 | GCAGGUGUUCUUUGGCUAU | 402 | 7221 | GCAGGUGUUCUUUGGCUAU | 402 | 7239 | AUAGCCAAAGAACACCUGC | 2053 |
| 7239 | UUUUGCUAGUCAUUUCAUC | 403 | 7239 | UUUUGCUAGUCAUUUCAUC | 403 | 7257 | GAUGAAAUGACUAGCAAAA | 2054 |
| 7257 | CAGCAAUUCUUGGCUCAUG | 404 | 7257 | CAGCAAUUCUUGGCUCAUG | 404 | 7275 | CAUGAGCCAAGAAUUGCUG | 2055 |
| 7275 | GUGGUUUAUCAUUAGUAUU | 405 | 7275 | GUGGUUUAUCAUUAGUAUU | 405 | 7293 | AAUACUAAUGAUAAACCAC | 2056 |
| 7293 | UGUACAAAUGGCACCCGUU | 406 | 7293 | UGUACAAAUGGCACCCGUU | 406 | 7311 | AACGGGUGCCAUUUGUACA | 2057 |
| 7311 | UUCUGCAAUGGUUAGGAUG | 407 | 7311 | UUCUGCAAUGGUUAGGAUG | 407 | 7329 | CAUCCUAACCAUUGCAGAA | 2058 |
| 7329 | GUACAUCUUCUUUGCUUCU | 408 | 7329 | GUACAUCUUCUUUGCUUCU | 408 | 7347 | AGAAGCAAAGAAGAUGUAC | 2059 |
| 7347 | UUUCUACUACAUAUGGAAG | 409 | 7347 | UUUCUACUACAUAUGGAAG | 409 | 7365 | CUUCCAUAUGUAGUAGAAA | 2060 |
| 7365 | GAGCUAUGUUCAUAUCAUG | 410 | 7365 | GAGCUAUGUUCAUAUCAUG | 410 | 7383 | CAUGAUAUGAACAUAGCUC | 2061 |
| 7383 | GGAUGGUUGCACCUCUUCG | 411 | 7383 | GGAUGGUUGCACCUCUUCG | 411 | 7401 | CGAAGAGGUGCAACCAUCC | 2062 |
| 7401 | GACUUGCAUGAUGUGCUAU | 412 | 7401 | GACUUGCAUGAUGUGCUAU | 412 | 7419 | AUAGCACAUCAUGCAAGUC | 2063 |
| 7419 | UAAGCGCAAUCGUGCCACA | 413 | 7419 | UAAGCGCAAUCGUGCCACA | 413 | 7437 | UGUGGCACGAUUGCGCUUA | 2064 |
| 7437 | ACGCGUUGAGUGUACAACU | 414 | 7437 | ACGCGUUGAGUGUACAACU | 414 | 7455 | AGUUGUACACUCAACGCGU | 2065 |
| 7455 | UAUUGUUAAUGGCAUGAAG | 415 | 7455 | UAUUGUUAAUGGCAUGAAG | 415 | 7473 | CUUCAUGCCAUUAACAAUA | 2066 |
| 7473 | GAGAUCUUUCUAUGUCUAU | 416 | 7473 | GAGAUCUUUCUAUGUCUAU | 416 | 7491 | AUAGACAUAGAAAGAUCUC | 2067 |
| 7491 | UGCAAAUGGAGGCCGUGGC | 417 | 7491 | UGCAAAUGGAGGCCGUGGC | 417 | 7509 | GCCACGGCCUCCAUUUGCA | 2068 |
| 7509 | CUUCUGCAAGACUCACAAU | 418 | 7509 | CUUCUGCAAGACUCACAAU | 418 | 7527 | AUUGUGAGUCUUGCAGAAG | 2069 |
| 7527 | UUGGAAUUGUCUCAAUUGU | 419 | 7527 | UUGGAAUUGUCUCAAUUGU | 419 | 7545 | ACAAUUGAGACAAUUCCAA | 2070 |
| 7545 | UGACACAUUUUGCACUGGU | 420 | 7545 | UGACACAUUUUGCACUGGU | 420 | 7563 | ACCAGUGCAAAAUGUGUCA | 2071 |
| 7563 | UAGUACAUUCAUUAGUGAU | 421 | 7563 | UAGUACAUUCAUUAGUGAU | 421 | 7581 | AUCACUAAUGAAUGUACUA | 2072 |
| 7581 | UGAAGUUGCUCGUGAUUUG | 422 | 7581 | UGAAGUUGCUCGUGAUUUG | 422 | 7599 | CAAAUCACGAGCAACUUCA | 2073 |
| 7599 | GUCACUCCAGUUUAAAAGA | 423 | 7599 | GUCACUCCAGUUUAAAAGA | 423 | 7617 | UCUUUUAAACUGGAGUGAC | 2074 |
| 7617 | ACCAAUCAACCCUACUGAC | 424 | 7617 | ACCAAUCAACCCUACUGAC | 424 | 7635 | GUCAGUAGGGUUGAUUGGU | 2075 |
| 7635 | CCAGUCAUCGUAUAUUGUU | 425 | 7635 | CCAGUCAUCGUAUAUUGUU | 425 | 7653 | AACAAUAUACGAUGACUGG | 2076 |
| 7653 | UGAUAGUGUUGCUGUGAAA | 426 | 7653 | UGAUAGUGUUGCUGUGAAA | 426 | 7671 | UUUCACAGCAACACUAUCA | 2077 |
| 7671 | AAAUGGCGCGCUUCACCUC | 427 | 7671 | AAAUGGCGCGCUUCACCUC | 427 | 7689 | GAGGUGAAGCGCGCCAUUU | 2078 |
| 7689 | CUACUUUGACAAGGCUGGU | 428 | 7689 | CUACUUUGACAAGGCUGGU | 428 | 7707 | ACCAGCCUUGUCAAAGUAG | 2079 |
| 7707 | UCAAAAGACCUAUGAGAGA | 429 | 7707 | UCAAAAGACCUAUGAGAGA | 429 | 7725 | UCUCUCAUAGGUCUUUUGA | 2080 |
| 7725 | ACAUCCGCUCUCCCAUUUU | 430 | 7725 | ACAUCCGCUCUCCCAUUUU | 430 | 7743 | AAAAUGGGAGAGCGGAUGU | 2081 |
| 7743 | UGUCAAUUUAGACAAUUUG | 431 | 7743 | UGUCAAUUUAGACAAUUUG | 431 | 7761 | CAAAUUGUCUAAAUUGACA | 2082 |
| 7761 | GAGAGCUAACAACACUAAA | 432 | 7761 | GAGAGCUAACAACACUAAA | 432 | 7779 | UUUAGUGUUGUUAGCUCUC | 2083 |
| 7779 | AGGUUCACUGCCUAUUAAU | 433 | 7779 | AGGUUCACUGCCUAUUAAU | 433 | 7797 | AUUAAUAGGCAGUGAACCU | 2084 |
| 7797 | UGUCAUAGUUUUUGAUGGC | 434 | 7797 | UGUCAUAGUUUUUGAUGGC | 434 | 7815 | GCCAUCAAAAACUAUGACA | 2085 |
| 7815 | CAAGUCCAAAUGCGACGAG | 435 | 7815 | CAAGUCCAAAUGCGACGAG | 435 | 7833 | CUCGUCGCAUUUGGACUUG | 2086 |
| 7833 | GUCUGCUUCUAAGUCUGCU | 436 | 7833 | GUCUGCUUCUAAGUCUGCU | 436 | 7851 | AGCAGACUUAGAAGCAGAC | 2087 |
| 7851 | UUCUGUGUACUACAGUCAG | 437 | 7851 | UUCUGUGUACUACAGUCAG | 437 | 7869 | CUGACUGUAGUACACAGAA | 2088 |
| 7869 | GCUGAUGUGCCAACCUAUU | 438 | 7869 | GCUGAUGUGCCAACCUAUU | 438 | 7887 | AAUAGGUUGGCACAUCAGC | 2089 |
| 7887 | UCUGUUGCUUGACCAAGCU | 439 | 7887 | UCUGUUGCUUGACCAAGCU | 439 | 7905 | AGCUUGGUCAAGCAACAGA | 2090 |
| 7905 | UCUUGUAUCAGACGUUGGA | 440 | 7905 | UCUUGUAUCAGACGUUGGA | 440 | 7923 | UCCAACGUCUGAUACAAGA | 2091 |
| 7923 | AGAUAGUACUGAAGUUUCC | 441 | 7923 | AGAUAGUACUGAAGUUUCC | 441 | 7941 | GGAAACUUCAGUACUAUCU | 2092 |
| 7941 | CGUUAAGAUGUUUGAUGCU | 442 | 7941 | CGUUAAGAUGUUUGAUGCU | 442 | 7959 | AGCAUCAAACAUCUUAACG | 2093 |
| 7959 | UUAUGUCGACACCUUUUCA | 443 | 7959 | UUAUGUCGACACCUUUUCA | 443 | 7977 | UGAAAAGGUGUCGACAUAA | 2094 |
| 7977 | AGCAACUUUUAGUGUUCCU | 444 | 7977 | AGCAACUUUUAGUGUUCCU | 444 | 7995 | AGGAACACUAAAAGUUGCU | 2095 |
| 7995 | UAUGGAAAAACUUAAGGCA | 445 | 7995 | UAUGGAAAAACUUAAGGCA | 445 | 8013 | UGCCUUAAGUUUUUCCAUA | 2096 |
| 8013 | ACUUGUUGCUACAGCUCAC | 446 | 8013 | ACUUGUUGCUACAGCUCAC | 446 | 8031 | GUGAGCUGUAGCAACAAGU | 2097 |
| 8031 | CAGCGAGUUAGCAAAGGGU | 447 | 8031 | CAGCGAGUUAGCAAAGGGU | 447 | 8049 | ACCCUUUGCUAACUCGCUG | 2098 |
| 8049 | UGUAGCUUUAGAUGGUGUC | 448 | 8049 | UGUAGCUUUAGAUGGUGUC | 448 | 8067 | GACACCAUCUAAAGCUACA | 2099 |
| 8067 | CCUUUCUACAUUCGUGUCA | 449 | 8067 | CCUUUCUACAUUCGUGUCA | 449 | 8085 | UGACACGAAUGUAGAAAGG | 2100 |
| 8085 | AGCUGCCCGACAAGGUGUU | 450 | 8085 | AGCUGCCCGACAAGGUGUU | 450 | 8103 | AACACCUUGUCGGGCAGCU | 2101 |
| 8103 | UGUUGAUACCGAUGUUGAC | 451 | 8103 | UGUUGAUACCGAUGUUGAC | 451 | 8121 | GUCAACAUCGGUAUCAACA | 2102 |
| 8121 | CACAAAGGAUGUUAUUGAA | 452 | 8121 | CACAAAGGAUGUUAUUGAA | 452 | 8139 | UUCAAUAACAUCCUUUGUG | 2103 |
| 8139 | AUGUCUCAAACUUUCACAU | 453 | 8139 | AUGUCUCAAACUUUCACAU | 453 | 8157 | AUGUGAAAGUUUGAGACAU | 2104 |
| 8157 | UCACUCUGACUUAGAAGUG | 454 | 8157 | UCACUCUGACUUAGAAGUG | 454 | 8175 | CACUUCUAAGUCAGAGUGA | 2105 |
| 8175 | GACAGGUGACAGUUGUAAC | 455 | 8175 | GACAGGUGACAGUUGUAAC | 455 | 8193 | GUUACAACUGUCACCUGUC | 2106 |
| 8193 | CAAUUUCAUGCUCACCUAU | 456 | 8193 | CAAUUUCAUGCUCACCUAU | 456 | 8211 | AUAGGUGAGCAUGAAAUUG | 2107 |
| 8211 | UAAUAAGGUUGAAAACAUG | 457 | 8211 | UAAUAAGGUUGAAAACAUG | 457 | 8229 | CAUGUUUUCAACCUUAUUA | 2108 |
| 8229 | GACGCCCAGAGAUCUUGGC | 458 | 8229 | GACGCCCAGAGAUCUUGGC | 458 | 8247 | GCCAAGAUCUCUGGGCGUC | 2109 |
| 8247 | CGCAUGUAUUGACUGUAAU | 459 | 8247 | CGCAUGUAUUGACUGUAAU | 459 | 8265 | AUUACAGUCAAUACAUGCG | 2110 |
| 8265 | UGCAAGGCAUAUCAAUGCC | 460 | 8265 | UGCAAGGCAUAUCAAUGCC | 460 | 8283 | GGCAUUGAUAUGCCUUGCA | 2111 |
| 8283 | CCAAGUAGCAAAAAGUCAC | 461 | 8283 | CCAAGUAGCAAAAAGUCAC | 461 | 8301 | GUGACUUUUUGCUACUUGG | 2112 |
| 8301 | CAAUGUUUCACUCAUCUGG | 462 | 8301 | CAAUGUUUCACUCAUCUGG | 462 | 8319 | CCAGAUGAGUGAAACAUUG | 2113 |
| 8319 | GAAUGUAAAAGACUACAUG | 463 | 8319 | GAAUGUAAAAGACUACAUG | 463 | 8337 | CAUGUAGUCUUUUACAUUC | 2114 |
| 8337 | GUCUUUAUCUGAACAGCUG | 464 | 8337 | GUCUUUAUCUGAACAGCUG | 464 | 8355 | CAGCUGUUCAGAUAAAGAC | 2115 |
| 8355 | GCGUAAACAAAUUCGUAGU | 465 | 8355 | GCGUAAACAAAUUCGUAGU | 465 | 8373 | ACUACGAAUUUGUUUACGC | 2116 |
| 8373 | UGCUGCCAAGAAGAACAAC | 466 | 8373 | UGCUGCCAAGAAGAACAAC | 466 | 8391 | GUUGUUCUUCUUGGCAGCA | 2117 |
| 8391 | CAUACCUUUUAGACUAACU | 467 | 8391 | CAUACCUUUUAGACUAACU | 467 | 8409 | AGUUAGUCUAAAAGGUAUG | 2118 |
| 8409 | UUGUGCUACAACUAGACAG | 468 | 8409 | UUGUGCUACAACUAGACAG | 468 | 8427 | CUGUCUAGUUGUAGCACAA | 2119 |
| 8427 | GGUUGUCAAUGUCAUAACU | 469 | 8427 | GGUUGUCAAUGUCAUAACU | 469 | 8445 | AGUUAUGACAUUGACAACC | 2120 |
| 8445 | UACUAAAAUCUCACUCAAG | 470 | 8445 | UACUAAAAUCUCACUCAAG | 470 | 8463 | CUUGAGUGAGAUUUUAGUA | 2121 |
| 8463 | GGGUGGUAAGAUUGUUAGU | 471 | 8463 | GGGUGGUAAGAUUGUUAGU | 471 | 8481 | ACUAACAAUCUUACCACCC | 2122 |
| 8481 | UACUUGUUUUAAACUUAUG | 472 | 8481 | UACUUGUUUUAAACUUAUG | 472 | 8499 | CAUAAGUUUAAAACAAGUA | 2123 |
| 8499 | GCUUAAGGCCACAUUAUUG | 473 | 8499 | GCUUAAGGCCACAUUAUUG | 473 | 8517 | CAAUAAUGUGGCCUUAAGC | 2124 |
| 8517 | GUGCGUUCUUGCUGCAUUG | 474 | 8517 | GUGCGUUCUUGCUGCAUUG | 474 | 8535 | CAAUGCAGCAAGAACGCAC | 2125 |
| 8535 | GGUUUGUUAUAUCGUUAUG | 475 | 8535 | GGUUUGUUAUAUCGUUAUG | 475 | 8553 | CAUAACGAUAUAACAAACC | 2126 |
| 8553 | GCCAGUACAUACAUUGUCA | 476 | 8553 | GCCAGUACAUACAUUGUCA | 476 | 8571 | UGACAAUGUAUGUACUGGC | 2127 |
| 8571 | AAUCCAUGAUGGUUACACA | 477 | 8571 | AAUCCAUGAUGGUUACACA | 477 | 8589 | UGUGUAACCAUCAUGGAUU | 2128 |
| 8589 | AAAUGAAAUCAUUGGUUAC | 478 | 8589 | AAAUGAAAUCAUUGGUUAC | 478 | 8607 | GUAACCAAUGAUUUCAUUU | 2129 |
| 8607 | CAAAGCCAUUCAGGAUGGU | 479 | 8607 | CAAAGCCAUUCAGGAUGGU | 479 | 8625 | ACCAUCCUGAAUGGCUUUG | 2130 |
| 8625 | UGUCACUCGUGACAUCAUU | 480 | 8625 | UGUCACUCGUGACAUCAUU | 480 | 8643 | AAUGAUGUCACGAGUGACA | 2131 |
| 8643 | UUCUACUGAUGAUUGUUUU | 481 | 8643 | UUCUACUGAUGAUUGUUUU | 481 | 8661 | AAAACAAUCAUCAGUAGAA | 2132 |
| 8661 | UGCAAAUAAACAUGCUGGU | 482 | 8661 | UGCAAAUAAACAUGCUGGU | 482 | 8679 | ACCAGCAUGUUUAUUUGCA | 2133 |
| 8679 | UUUUGACGCAUGGUUUAGC | 483 | 8679 | UUUUGACGCAUGGUUUAGC | 483 | 8697 | GCUAAACCAUGCGUCAAAA | 2134 |
| 8697 | CCAGCGUGGUGGUUCAUAC | 484 | 8697 | CCAGCGUGGUGGUUCAUAC | 484 | 8715 | GUAUGAACCACCACGCUGG | 2135 |
| 8715 | CAAAAAUGACAAAAGCUGC | 485 | 8715 | CAAAAAUGACAAAAGCUGC | 485 | 8733 | GCAGCUUUUGUCAUUUUUG | 2136 |
| 8733 | CCCUGUAGUAGCUGCUAUC | 486 | 8733 | CCCUGUAGUAGCUGCUAUC | 486 | 8751 | GAUAGCAGCUACUACAGGG | 2137 |
| 8751 | CAUUACAAGAGAGAUUGGU | 487 | 8751 | CAUUACAAGAGAGAUUGGU | 487 | 8769 | ACCAAUCUCUCUUGUAAUG | 2138 |
| 8769 | UUUCAUAGUGCCUGGCUUA | 488 | 8769 | UUUCAUAGUGCCUGGCUUA | 488 | 8787 | UAAGCCAGGCACUAUGAAA | 2139 |
| 8787 | ACCGGGUACUGUGCUGAGA | 489 | 8787 | ACCGGGUACUGUGCUGAGA | 489 | 8805 | UCUCAGCACAGUACCCGGU | 2140 |
| 8805 | AGCAAUCAAUGGUGACUUC | 490 | 8805 | AGCAAUCAAUGGUGACUUC | 490 | 8823 | GAAGUCACCAUUGAUUGCU | 2141 |
| 8823 | CUUGCAUUUUCUACCUCGU | 491 | 8823 | CUUGCAUUUUCUACCUCGU | 491 | 8841 | ACGAGGUAGAAAAUGCAAG | 2142 |
| 8841 | UGUUUUUAGUGCUGUUGGC | 492 | 8841 | UGUUUUUAGUGCUGUUGGC | 492 | 8859 | GCCAACAGCACUAAAAACA | 2143 |
| 8859 | CAACAUUUGCUACACACCU | 493 | 8859 | CAACAUUUGCUACACACCU | 493 | 8877 | AGGUGUGUAGCAAAUGUUG | 2144 |
| 8877 | UUCCAAACUCAUUGAGUAU | 494 | 8877 | UUCCAAACUCAUUGAGUAU | 494 | 8895 | AUACUCAAUGAGUUUGGAA | 2145 |
| 8895 | UAGUGAUUUUGCUACCUCU | 495 | 8895 | UAGUGAUUUUGCUACCUCU | 495 | 8913 | AGAGGUAGCAAAAUCACUA | 2146 |
| 8913 | UGCUUGCGUUCUUGCUGCU | 496 | 8913 | UGCUUGCGUUCUUGCUGCU | 496 | 8931 | AGCAGCAAGAACGCAAGCA | 2147 |
| 8931 | UGAGUGUACAAUUUUUAAG | 497 | 8931 | UGAGUGUACAAUUUUUAAG | 497 | 8949 | CUUAAAAAUUGUACACUCA | 2148 |
| 8949 | GGAUGCUAUGGGCAAACCU | 498 | 8949 | GGAUGCUAUGGGCAAACCU | 498 | 8967 | AGGUUUGCCCAUAGCAUCC | 2149 |
| 8967 | UGUGCCAUAUUGUUAUGAC | 499 | 8967 | UGUGCCAUAUUGUUAUGAC | 499 | 8985 | GUCAUAACAAUAUGGCACA | 2150 |
| 8985 | CACUAAUUUGCUAGAGGGU | 500 | 8985 | CACUAAUUUGCUAGAGGGU | 500 | 9003 | ACCCUCUAGCAAAUUAGUG | 2151 |
| 9003 | UUCUAUUUCUUAUAGUGAG | 501 | 9003 | UUCUAUUUCUUAUAGUGAG | 501 | 9021 | CUCACUAUAAGAAAUAGAA | 2152 |
| 9021 | GCUUCGUCCAGACACUCGU | 502 | 9021 | GCUUCGUCCAGACACUCGU | 502 | 9039 | ACGAGUGUCUGGACGAAGC | 2153 |
| 9039 | UUAUGUGCUUAUGGAUGGU | 503 | 9039 | UUAUGUGCUUAUGGAUGGU | 503 | 9057 | ACCAUCCAUAAGCACAUAA | 2154 |
| 9057 | UUCCAUCAUACAGUUUCCU | 504 | 9057 | UUCCAUCAUACAGUUUCCU | 504 | 9075 | AGGAAACUGUAUGAUGGAA | 2155 |
| 9075 | UAACACUUACCUGGAGGGU | 505 | 9075 | UAACACUUACCUGGAGGGU | 505 | 9093 | ACCCUCCAGGUAAGUGUUA | 2156 |
| 9093 | UUCUGUUAGAGUAGUAACA | 506 | 9093 | UUCUGUUAGAGUAGUAACA | 506 | 9111 | UGUUACUACUCUAACAGAA | 2157 |
| 9111 | AACUUUUGAUGCUGAGUAC | 507 | 9111 | AACUUUUGAUGCUGAGUAC | 507 | 9129 | GUACUCAGCAUCAAAAGUU | 2158 |
| 9129 | CUGUAGACAUGGUACAUGC | 508 | 9129 | CUGUAGACAUGGUACAUGC | 508 | 9147 | GCAUGUACCAUGUCUACAG | 2159 |
| 9147 | CGAAAGGUCAGAAGUAGGU | 509 | 9147 | CGAAAGGUCAGAAGUAGGU | 509 | 9165 | ACCUACUUCUGACCUUUCG | 2160 |
| 9165 | UAUUUGCCUAUCUACCAGU | 510 | 9165 | UAUUUGCCUAUCUACCAGU | 510 | 9183 | ACUGGUAGAUAGGCAAAUA | 2161 |
| 9183 | UGGUAGAUGGGUUCUUAAU | 511 | 9183 | UGGUAGAUGGGUUCUUAAU | 511 | 9201 | AUUAAGAACCCAUCUACCA | 2162 |
| 9201 | UAAUGAGCAUUACAGAGCU | 512 | 9201 | UAAUGAGCAUUACAGAGCU | 512 | 9219 | AGCUCUGUAAUGCUCAUUA | 2163 |
| 9219 | UCUAUCAGGAGUUUUCUGU | 513 | 9219 | UCUAUCAGGAGUUUUCUGU | 513 | 9237 | ACAGAAAACUCCUGAUAGA | 2164 |
| 9237 | UGGUGUUGAUGCGAUGAAU | 514 | 9237 | UGGUGUUGAUGCGAUGAAU | 514 | 9255 | AUUCAUCGCAUCAACACCA | 2165 |
| 9255 | UCUCAUAGCUAACAUCUUU | 515 | 9255 | UCUCAUAGCUAACAUCUUU | 515 | 9273 | AAAGAUGUUAGCUAUGAGA | 2166 |
| 9273 | UACUCCUCUUGUGCAACCU | 516 | 9273 | UACUCCUCUUGUGCAACCU | 516 | 9291 | AGGUUGCACAAGAGGAGUA | 2167 |
| 9291 | UGUGGGUGCUUUAGAUGUG | 517 | 9291 | UGUGGGUGCUUUAGAUGUG | 517 | 9309 | CACAUCUAAAGCACCCACA | 2168 |
| 9309 | GUCUGCUUCAGUAGUGGCU | 518 | 9309 | GUCUGCUUCAGUAGUGGCU | 518 | 9327 | AGCCACUACUGAAGCAGAC | 2169 |
| 9327 | UGGUGGUAUUAUUGCCAUA | 519 | 9327 | UGGUGGUAUUAUUGCCAUA | 519 | 9345 | UAUGGCAAUAAUACCACCA | 2170 |
| 9345 | AUUGGUGACUUGUGCUGCC | 520 | 9345 | AUUGGUGACUUGUGCUGCC | 520 | 9363 | GGCAGCACAAGUCACCAAU | 2171 |
| 9363 | CUACUACUUUAUGAAAUUC | 521 | 9363 | CUACUACUUUAUGAAAUUC | 521 | 9381 | GAAUUUCAUAAAGUAGUAG | 2172 |
| 9381 | CAGACGUGUUUUUGGUGAG | 522 | 9381 | CAGACGUGUUUUUGGUGAG | 522 | 9399 | CUCACCAAAAACACGUCUG | 2173 |
| 9399 | GUACAACCAUGUUGUUGCU | 523 | 9399 | GUACAACCAUGUUGUUGCU | 523 | 9417 | AGCAACAACAUGGUUGUAC | 2174 |
| 9417 | UGCUAAUGCACUUUUGUUU | 524 | 9417 | UGCUAAUGCACUUUUGUUU | 524 | 9435 | AAACAAAAGUGCAUUAGCA | 2175 |
| 9435 | UUUGAUGUCUUUCACUAUA | 525 | 9435 | UUUGAUGUCUUUCACUAUA | 525 | 9453 | UAUAGUGAAAGACAUCAAA | 2176 |
| 9453 | ACUCUGUCUGGUACCAGCU | 526 | 9453 | ACUCUGUCUGGUACCAGCU | 526 | 9471 | AGCUGGUACCAGACAGAGU | 2177 |
| 9471 | UUACAGCUUUCUGCCGGGA | 527 | 9471 | UUACAGCUUUCUGCCGGGA | 527 | 9489 | UCCCGGCAGAAAGCUGUAA | 2178 |
| 9489 | AGUCUACUCAGUCUUUUAC | 528 | 9489 | AGUCUACUCAGUCUUUUAC | 528 | 9507 | GUAAAAGACUGAGUAGACU | 2179 |
| 9507 | CUUGUACUUGACAUUCUAU | 529 | 9507 | CUUGUACUUGACAUUCUAU | 529 | 9525 | AUAGAAUGUCAAGUACAAG | 2180 |
| 9525 | UUUCACCAAUGAUGUUUCA | 530 | 9525 | UUUCACCAAUGAUGUUUCA | 530 | 9543 | UGAAACAUCAUUGGUGAAA | 2181 |
| 9543 | AUUCUUGGCUCACCUUCAA | 531 | 9543 | AUUCUUGGCUCACCUUCAA | 531 | 9561 | UUGAAGGUGAGCCAAGAAU | 2182 |
| 9561 | AUGGUUUGCCAUGUUUUCU | 532 | 9561 | AUGGUUUGCCAUGUUUUCU | 532 | 9579 | AGAAAACAUGGCAAACCAU | 2183 |
| 9579 | UCCUAUUGUGCCUUUUUGG | 533 | 9579 | UCCUAUUGUGCCUUUUUGG | 533 | 9597 | CCAAAAAGGCACAAUAGGA | 2184 |
| 9597 | GAUAACAGCAAUCUAUGUA | 534 | 9597 | GAUAACAGCAAUCUAUGUA | 534 | 9615 | UACAUAGAUUGCUGUUAUC | 2185 |
| 9615 | AUUCUGUAUUUCUCUGAAG | 535 | 9615 | AUUCUGUAUUUCUCUGAAG | 535 | 9633 | CUUCAGAGAAAUACAGAAU | 2186 |
| 9633 | GCACUGCCAUUGGUUCUUU | 536 | 9633 | GCACUGCCAUUGGUUCUUU | 536 | 9651 | AAAGAACCAAUGGCAGUGC | 2187 |
| 9651 | UAACAACUAUCUUAGGAAA | 537 | 9651 | UAACAACUAUCUUAGGAAA | 537 | 9669 | UUUCCUAAGAUAGUUGUUA | 2188 |
| 9669 | AAGAGUCAUGUUUAAUGGA | 538 | 9669 | AAGAGUCAUGUUUAAUGGA | 538 | 9687 | UCCAUUAAACAUGACUCUU | 2189 |
| 9687 | AGUUACAUUUAGUACCUUC | 539 | 9687 | AGUUACAUUUAGUACCUUC | 539 | 9705 | GAAGGUACUAAAUGUAACU | 2190 |
| 9705 | CGAGGAGGCUGCUUUGUGU | 540 | 9705 | CGAGGAGGCUGCUUUGUGU | 540 | 9723 | ACACAAAGCAGCCUCCUCG | 2191 |
| 9723 | UACCUUUUUGCUCAACAAG | 541 | 9723 | UACCUUUUUGCUCAACAAG | 541 | 9741 | CUUGUUGAGCAAAAAGGUA | 2192 |
| 9741 | GGAAAUGUACCUAAAAUUG | 542 | 9741 | GGAAAUGUACCUAAAAUUG | 542 | 9759 | CAAUUUUAGGUACAUUUCC | 2193 |
| 9759 | GCGUAGCGAGACACUGUUG | 543 | 9759 | GCGUAGCGAGACACUGUUG | 543 | 9777 | CAACAGUGUCUCGCUACGC | 2194 |
| 9777 | GCCACUUACACAGUAUAAC | 544 | 9777 | GCCACUUACACAGUAUAAC | 544 | 9795 | GUUAUACUGUGUAAGUGGC | 2195 |
| 9795 | CAGGUAUCUUGCUCUAUAU | 545 | 9795 | CAGGUAUCUUGCUCUAUAU | 545 | 9813 | AUAUAGAGCAAGAUACCUG | 2196 |
| 9813 | UAACAAGUACAAGUAUUUC | 546 | 9813 | UAACAAGUACAAGUAUUUC | 546 | 9831 | GAAAUACUUGUACUUGUUA | 2197 |
| 9831 | CAGUGGAGCCUUAGAUACU | 547 | 9831 | CAGUGGAGCCUUAGAUACU | 547 | 9849 | AGUAUCUAAGGCUCCACUG | 2198 |
| 9849 | UACCAGCUAUCGUGAAGCA | 548 | 9849 | UACCAGCUAUCGUGAAGCA | 548 | 9867 | UGCUUCACGAUAGCUGGUA | 2199 |
| 9867 | AGCUUGCUGCCACUUAGCA | 549 | 9867 | AGCUUGCUGCCACUUAGCA | 549 | 9885 | UGCUAAGUGGCAGCAAGCU | 2200 |
| 9885 | AAAGGCUCUAAAUGACUUU | 550 | 9885 | AAAGGCUCUAAAUGACUUU | 550 | 9903 | AAAGUCAUUUAGAGCCUUU | 2201 |
| 9903 | UAGCAACUCAGGUGCUGAU | 551 | 9903 | UAGCAACUCAGGUGCUGAU | 551 | 9921 | AUCAGCACCUGAGUUGCUA | 2202 |
| 9921 | UGUUCUCUACCAACCACCA | 552 | 9921 | UGUUCUCUACCAACCACCA | 552 | 9939 | UGGUGGUUGGUAGAGAACA | 2203 |
| 9939 | ACAGACAUCAAUCACUUCU | 553 | 9939 | ACAGACAUCAAUCACUUCU | 553 | 9957 | AGAAGUGAUUGAUGUCUGU | 2204 |
| 9957 | UGCUGUUCUGCAGAGUGGU | 554 | 9957 | UGCUGUUCUGCAGAGUGGU | 554 | 9975 | ACCACUCUGCAGAACAGCA | 2205 |
| 9975 | UUUUAGGAAAAUGGCAUUC | 555 | 9975 | UUUUAGGAAAAUGGCAUUC | 555 | 9993 | GAAUGCCAUUUUCCUAAAA | 2206 |
| 9993 | CCCGUCAGGCAAAGUUGAA | 556 | 9993 | CCCGUCAGGCAAAGUUGAA | 556 | 10011 | UUCAACUUUGCCUGACGGG | 2207 |
| 10011 | AGGGUGCAUGGUACAAGUA | 557 | 10011 | AGGGUGCAUGGUACAAGUA | 557 | 10029 | UACUUGUACCAUGCACCCU | 2208 |
| 10029 | AACCUGUGGAACUACAACU | 558 | 10029 | AACCUGUGGAACUACAACU | 558 | 10047 | AGUUGUAGUUCCACAGGUU | 2209 |
| 10047 | UCUUAAUGGAUUGUGGUUG | 559 | 10047 | UCUUAAUGGAUUGUGGUUG | 559 | 10065 | CAACCACAAUCCAUUAAGA | 2210 |
| 10065 | GGAUGACACAGUAUACUGU | 560 | 10065 | GGAUGACACAGUAUACUGU | 560 | 10083 | ACAGUAUACUGUGUCAUCC | 2211 |
| 10083 | UCCAAGACAUGUCAUUUGC | 561 | 10083 | UCCAAGACAUGUCAUUUGC | 561 | 10101 | GCAAAUGACAUGUCUUGGA | 2212 |
| 10101 | CACAGCAGAAGACAUGCUU | 562 | 10101 | CACAGCAGAAGACAUGCUU | 562 | 10119 | AAGCAUGUCUUCUGCUGUG | 2213 |
| 10119 | UAAUCCUAACUAUGAAGAU | 563 | 10119 | UAAUCCUAACUAUGAAGAU | 563 | 10137 | AUCUUCAUAGUUAGGAUUA | 2214 |
| 10137 | UCUGCUCAUUCGCAAAUCC | 564 | 10137 | UCUGCUCAUUCGCAAAUCC | 564 | 10155 | GGAUUUGCGAAUGAGCAGA | 2215 |
| 10155 | CAACCAUAGCUUUCUUGUU | 565 | 10155 | CAACCAUAGCUUUCUUGUU | 565 | 10173 | AACAAGAAAGCUAUGGUUG | 2216 |
| 10173 | UCAGGCUGGCAAUGUUCAA | 566 | 10173 | UCAGGCUGGCAAUGUUCAA | 566 | 10191 | UUGAACAUUGCCAGCCUGA | 2217 |
| 10191 | ACUUCGUGUUAUUGGCCAU | 567 | 10191 | ACUUCGUGUUAUUGGCCAU | 567 | 10209 | AUGGCCAAUAACACGAAGU | 2218 |
| 10209 | UUCUAUGCAAAAUUGUCUG | 568 | 10209 | UUCUAUGCAAAAUUGUCUG | 568 | 10227 | CAGACAAUUUUGCAUAGAA | 2219 |
| 10227 | GCUUAGGCUUAAAGUUGAU | 569 | 10227 | GCUUAGGCUUAAAGUUGAU | 569 | 10245 | AUCAACUUUAAGCCUAAGC | 2220 |
| 10245 | UACUUCUAACCCUAAGACA | 570 | 10245 | UACUUCUAACCCUAAGACA | 570 | 10263 | UGUCUUAGGGUUAGAAGUA | 2221 |
| 10263 | ACCCAAGUAUAAAUUUGUC | 571 | 10263 | ACCCAAGUAUAAAUUUGUC | 571 | 10281 | GACAAAUUUAUACUUGGGU | 2222 |
| 10281 | CCGUAUCCAACCUGGUCAA | 572 | 10281 | CCGUAUCCAACCUGGUCAA | 572 | 10299 | UUGACCAGGUUGGAUACGG | 2223 |
| 10299 | AACAUUUUCAGUUCUAGCA | 573 | 10299 | AACAUUUUCAGUUCUAGCA | 573 | 10317 | UGCUAGAACUGAAAAUGUU | 2224 |
| 10317 | AUGCUACAAUGGUUCACCA | 574 | 10317 | AUGCUACAAUGGUUCACCA | 574 | 10335 | UGGUGAACCAUUGUAGCAU | 2225 |
| 10335 | AUCUGGUGUUUAUCAGUGU | 575 | 10335 | AUCUGGUGUUUAUCAGUGU | 575 | 10353 | ACACUGAUAAACACCAGAU | 2226 |
| 10353 | UGCCAUGAGACCUAAUCAU | 576 | 10353 | UGCCAUGAGACCUAAUCAU | 576 | 10371 | AUGAUUAGGUCUCAUGGCA | 2227 |
| 10371 | UACCAUUAAAGGUUCUUUC | 577 | 10371 | UACCAUUAAAGGUUCUUUC | 577 | 10389 | GAAAGAACCUUUAAUGGUA | 2228 |
| 10389 | CCUUAAUGGAUCAUGUGGU | 578 | 10389 | CCUUAAUGGAUCAUGUGGU | 578 | 10407 | ACCACAUGAUCCAUUAAGG | 2229 |
| 10407 | UAGUGUUGGUUUUAACAUU | 579 | 10407 | UAGUGUUGGUUUUAACAUU | 579 | 10425 | AAUGUUAAAACCAACACUA | 2230 |
| 10425 | UGAUUAUGAUUGCGUGUCU | 580 | 10425 | UGAUUAUGAUUGCGUGUCU | 580 | 10443 | AGACACGCAAUCAUAAUCA | 2231 |
| 10443 | UUUCUGCUAUAUGCAUCAU | 581 | 10443 | UUUCUGCUAUAUGCAUCAU | 581 | 10461 | AUGAUGCAUAUAGCAGAAA | 2232 |
| 10461 | UAUGGAGCUUCCAACAGGA | 582 | 10461 | UAUGGAGCUUCCAACAGGA | 582 | 10479 | UCCUGUUGGAAGCUCCAUA | 2233 |
| 10479 | AGUACACGCUGGUACUGAC | 583 | 10479 | AGUACACGCUGGUACUGAC | 583 | 10497 | GUCAGUACCAGCGUGUACU | 2234 |
| 10497 | CUUAGAAGGUAAAUUCUAU | 584 | 10497 | CUUAGAAGGUAAAUUCUAU | 584 | 10515 | AUAGAAUUUACCUUCUAAG | 2235 |
| 10515 | UGGUCCAUUUGUUGACAGA | 585 | 10515 | UGGUCCAUUUGUUGACAGA | 585 | 10533 | UCUGUCAACAAAUGGACCA | 2236 |
| 10533 | ACAAACUGCACAGGCUGCA | 586 | 10533 | ACAAACUGCACAGGCUGCA | 586 | 10551 | UGCAGCCUGUGCAGUUUGU | 2237 |
| 10551 | AGGUACAGACACAACCAUA | 587 | 10551 | AGGUACAGACACAACCAUA | 587 | 10569 | UAUGGUUGUGUCUGUACCU | 2238 |
| 10569 | AACAUUAAAUGUUUUGGCA | 588 | 10569 | AACAUUAAAUGUUUUGGCA | 588 | 10587 | UGCCAAAACAUUUAAUGUU | 2239 |
| 10587 | AUGGCUGUAUGCUGCUGUU | 589 | 10587 | AUGGCUGUAUGCUGCUGUU | 589 | 10605 | AACAGCAGCAUACAGCCAU | 2240 |
| 10605 | UAUCAAUGGUGAUAGGUGG | 590 | 10605 | UAUCAAUGGUGAUAGGUGG | 590 | 10623 | CCACCUAUCACCAUUGAUA | 2241 |
| 10623 | GUUUCUUAAUAGAUUCACC | 591 | 10623 | GUUUCUUAAUAGAUUCACC | 591 | 10641 | GGUGAAUCUAUUAAGAAAC | 2242 |
| 10641 | CACUACUUUGAAUGACUUU | 592 | 10641 | CACUACUUUGAAUGACUUU | 592 | 10659 | AAAGUCAUUCAAAGUAGUG | 2243 |
| 10659 | UAACCUUGUGGCAAUGAAG | 593 | 10659 | UAACCUUGUGGCAAUGAAG | 593 | 10677 | CUUCAUUGCCACAAGGUUA | 2244 |
| 10677 | GUACAACUAUGAACCUUUG | 594 | 10677 | GUACAACUAUGAACCUUUG | 594 | 10695 | CAAAGGUUCAUAGUUGUAC | 2245 |
| 10695 | GACACAAGAUCAUGUUGAC | 595 | 10695 | GACACAAGAUCAUGUUGAC | 595 | 10713 | GUCAACAUGAUCUUGUGUC | 2246 |
| 10713 | CAUAUUGGGACCUCUUUCU | 596 | 10713 | CAUAUUGGGACCUCUUUCU | 596 | 10731 | AGAAAGAGGUCCCAAUAUG | 2247 |
| 10731 | UGCUCAAACAGGAAUUGCC | 597 | 10731 | UGCUCAAACAGGAAUUGCC | 597 | 10749 | GGCAAUUCCUGUUUGAGCA | 2248 |
| 10749 | CGUCUUAGAUAUGUGUGCU | 598 | 10749 | CGUCUUAGAUAUGUGUGCU | 598 | 10767 | AGCACACAUAUCUAAGACG | 2249 |
| 10767 | UGCUUUGAAAGAGCUGCUG | 599 | 10767 | UGCUUUGAAAGAGCUGCUG | 599 | 10785 | CAGCAGCUCUUUCAAAGCA | 2250 |
| 10785 | GCAGAAUGGUAUGAAUGGU | 600 | 10785 | GCAGAAUGGUAUGAAUGGU | 600 | 10803 | ACCAUUCAUACCAUUCUGC | 2251 |
| 10803 | UCGUACUAUCCUUGGUAGC | 601 | 10803 | UCGUACUAUCCUUGGUAGC | 601 | 10821 | GCUACCAAGGAUAGUACGA | 2252 |
| 10821 | CACUAUUUUAGAAGAUGAG | 602 | 10821 | CACUAUUUUAGAAGAUGAG | 602 | 10839 | CUCAUCUUCUAAAAUAGUG | 2253 |
| 10839 | GUUUACACCAUUUGAUGUU | 603 | 10839 | GUUUACACCAUUUGAUGUU | 603 | 10857 | AACAUCAAAUGGUGUAAAC | 2254 |
| 10857 | UGUUAGACAAUGCUCUGGU | 604 | 10857 | UGUUAGACAAUGCUCUGGU | 604 | 10875 | ACCAGAGCAUUGUCUAACA | 2255 |
| 10875 | UGUUACCUUCCAAGGUAAG | 605 | 10875 | UGUUACCUUCCAAGGUAAG | 605 | 10893 | CUUACCUUGGAAGGUAACA | 2256 |
| 10893 | GUUCAAGAAAAUUGUUAAG | 606 | 10893 | GUUCAAGAAAAUUGUUAAG | 606 | 10911 | CUUAACAAUUUUCUUGAAC | 2257 |
| 10911 | GGGCACUCAUCAUUGGAUG | 607 | 10911 | GGGCACUCAUCAUUGGAUG | 607 | 10929 | CAUCCAAUGAUGAGUGCCC | 2258 |
| 10929 | GCUUUUAACUUUCUUGACA | 608 | 10929 | GCUUUUAACUUUCUUGACA | 608 | 10947 | UGUCAAGAAAGUUAAAAGC | 2259 |
| 10947 | AUCACUAUUGAUUCUUGUU | 609 | 10947 | AUCACUAUUGAUUCUUGUU | 609 | 10965 | AACAAGAAUCAAUAGUGAU | 2260 |
| 10965 | UCAAAGUACACAGUGGUCA | 610 | 10965 | UCAAAGUACACAGUGGUCA | 610 | 10983 | UGACCACUGUGUACUUUGA | 2261 |
| 10983 | ACUGUUUUUCUUUGUUUAC | 611 | 10983 | ACUGUUUUUCUUUGUUUAC | 611 | 11001 | GUAAACAAAGAAAAACAGU | 2262 |
| 11001 | CGAGAAUGCUUUCUUGCCA | 612 | 11001 | CGAGAAUGCUUUCUUGCCA | 612 | 11019 | UGGCAAGAAAGCAUUCUCG | 2263 |
| 11019 | AUUUACUCUUGGUAUUAUG | 613 | 11019 | AUUUACUCUUGGUAUUAUG | 613 | 11037 | CAUAAUACCAAGAGUAAAU | 2264 |
| 11037 | GGCAAUUGCUGCAUGUGCU | 614 | 11037 | GGCAAUUGCUGCAUGUGCU | 614 | 11055 | AGCACAUGCAGCAAUUGCC | 2265 |
| 11055 | UAUGCUGCUUGUUAAGCAU | 615 | 11055 | UAUGCUGCUUGUUAAGCAU | 615 | 11073 | AUGCUUAACAAGCAGCAUA | 2266 |
| 11073 | UAAGCACGCAUUCUUGUGC | 616 | 11073 | UAAGCACGCAUUCUUGUGC | 616 | 11091 | GCACAAGAAUGCGUGCUUA | 2267 |
| 11091 | CUUGUUUCUGUUACCUUCU | 617 | 11091 | CUUGUUUCUGUUACCUUCU | 617 | 11109 | AGAAGGUAACAGAAACAAG | 2268 |
| 11109 | UCUUGCAACAGUUGCUUAC | 618 | 11109 | UCUUGCAACAGUUGCUUAC | 618 | 11127 | GUAAGCAACUGUUGCAAGA | 2269 |
| 11127 | CUUUAAUAUGGUCUACAUG | 619 | 11127 | CUUUAAUAUGGUCUACAUG | 619 | 11145 | CAUGUAGACCAUAUUAAAG | 2270 |
| 11145 | GCCUGCUAGCUGGGUGAUG | 620 | 11145 | GCCUGCUAGCUGGGUGAUG | 620 | 11163 | CAUCACCCAGCUAGCAGGC | 2271 |
| 11163 | GCGUAUCAUGACAUGGCUU | 621 | 11163 | GCGUAUCAUGACAUGGCUU | 621 | 11181 | AAGCCAUGUCAUGAUACGC | 2272 |
| 11181 | UGAAUUGGCUGACACUAGC | 622 | 11181 | UGAAUUGGCUGACACUAGC | 622 | 11199 | GCUAGUGUCAGCCAAUUCA | 2273 |
| 11199 | CUUGUCUGGUUAUAGGCUU | 623 | 11199 | CUUGUCUGGUUAUAGGCUU | 623 | 11217 | AAGCCUAUAACCAGACAAG | 2274 |
| 11217 | UAAGGAUUGUGUUAUGUAU | 624 | 11217 | UAAGGAUUGUGUUAUGUAU | 624 | 11235 | AUACAUAACACAAUCCUUA | 2275 |
| 11235 | UGCUUCAGCUUUAGUUUUG | 625 | 11235 | UGCUUCAGCUUUAGUUUUG | 625 | 11253 | CAAAACUAAAGCUGAAGCA | 2276 |
| 11253 | GCUUAUUCUCAUGACAGCU | 626 | 11253 | GCUUAUUCUCAUGACAGCU | 626 | 11271 | AGCUGUCAUGAGAAUAAGC | 2277 |
| 11271 | UCGCACUGUUUAUGAUGAU | 627 | 11271 | UCGCACUGUUUAUGAUGAU | 627 | 11289 | AUCAUCAUAAACAGUGCGA | 2278 |
| 11289 | UGCUGCUAGACGUGUUUGG | 628 | 11289 | UGCUGCUAGACGUGUUUGG | 628 | 11307 | CCAAACACGUCUAGCAGCA | 2279 |
| 11307 | GACACUGAUGAAUGUCAUU | 629 | 11307 | GACACUGAUGAAUGUCAUU | 629 | 11325 | AAUGACAUUCAUCAGUGUC | 2280 |
| 11325 | UACACUUGUUUACAAAGUC | 630 | 11325 | UACACUUGUUUACAAAGUC | 630 | 11343 | GACUUUGUAAACAAGUGUA | 2281 |
| 11343 | CUACUAUGGUAAUGCUUUA | 631 | 11343 | CUACUAUGGUAAUGCUUUA | 631 | 11361 | UAAAGCAUUACCAUAGUAG | 2282 |
| 11361 | AGAUCAAGCUAUUUCCAUG | 632 | 11361 | AGAUCAAGCUAUUUCCAUG | 632 | 11379 | CAUGGAAAUAGCUUGAUCU | 2283 |
| 11379 | GUGGGCCUUAGUUAUUUCU | 633 | 11379 | GUGGGCCUUAGUUAUUUCU | 633 | 11397 | AGAAAUAACUAAGGCCCAC | 2284 |
| 11397 | UGUAACCUCUAACUAUUCU | 634 | 11397 | UGUAACCUCUAACUAUUCU | 634 | 11415 | AGAAUAGUUAGAGGUUACA | 2285 |
| 11415 | UGGUGUCGUUACGACUAUC | 635 | 11415 | UGGUGUCGUUACGACUAUC | 635 | 11433 | GAUAGUCGUAACGACACCA | 2286 |
| 11433 | CAUGUUUUUAGCUAGAGCU | 636 | 11433 | CAUGUUUUUAGCUAGAGCU | 636 | 11451 | AGCUCUAGCUAAAAACAUG | 2287 |
| 11451 | UAUAGUGUUUGUGUGUGUU | 637 | 11451 | UAUAGUGUUUGUGUGUGUU | 637 | 11469 | AACACACACAAACACUAUA | 2288 |
| 11469 | UGAGUAUUACCCAUUGUUA | 638 | 11469 | UGAGUAUUACCCAUUGUUA | 638 | 11487 | UAACAAUGGGUAAUACUCA | 2289 |
| 11487 | AUUUAUUACUGGCAACACC | 639 | 11487 | AUUUAUUACUGGCAACACC | 639 | 11505 | GGUGUUGCCAGUAAUAAAU | 2290 |
| 11505 | CUUACAGUGUAUCAUGCUU | 640 | 11505 | CUUACAGUGUAUCAUGCUU | 640 | 11523 | AAGCAUGAUACACUGUAAG | 2291 |
| 11523 | UGUUUAUUGUUUCUUAGGC | 641 | 11523 | UGUUUAUUGUUUCUUAGGC | 641 | 11541 | GCCUAAGAAACAAUAAACA | 2292 |
| 11541 | CUAUUGUUGCUGCUGCUAC | 642 | 11541 | CUAUUGUUGCUGCUGCUAC | 642 | 11559 | GUAGCAGCAGCAACAAUAG | 2293 |
| 11559 | CUUUGGCCUUUUCUGUUUA | 643 | 11559 | CUUUGGCCUUUUCUGUUUA | 643 | 11577 | UAAACAGAAAAGGCCAAAG | 2294 |
| 11577 | ACUCAACCGUUACUUCAGG | 644 | 11577 | ACUCAACCGUUACUUCAGG | 644 | 11595 | CCUGAAGUAACGGUUGAGU | 2295 |
| 11595 | GCUUACUCUUGGUGUUUAU | 645 | 11595 | GCUUACUCUUGGUGUUUAU | 645 | 11613 | AUAAACACCAAGAGUAAGC | 2296 |
| 11613 | UGACUACUUGGUCUCUACA | 646 | 11613 | UGACUACUUGGUCUCUACA | 646 | 11631 | UGUAGAGACCAAGUAGUCA | 2297 |
| 11631 | ACAAGAAUUUAGGUAUAUG | 647 | 11631 | ACAAGAAUUUAGGUAUAUG | 647 | 11649 | CAUAUACCUAAAUUCUUGU | 2298 |
| 11649 | GAACUCCCAGGGGCUUUUG | 648 | 11649 | GAACUCCCAGGGGCUUUUG | 648 | 11667 | CAAAAGCCCCUGGGAGUUC | 2299 |
| 11667 | GCCUCCUAAGAGUAGUAUU | 649 | 11667 | GCCUCCUAAGAGUAGUAUU | 649 | 11685 | AAUACUACUCUUAGGAGGC | 2300 |
| 11685 | UGAUGCUUUCAAGCUUAAC | 650 | 11685 | UGAUGCUUUCAAGCUUAAC | 650 | 11703 | GUUAAGCUUGAAAGCAUCA | 2301 |
| 11703 | CAUUAAGUUGUUGGGUAUU | 651 | 11703 | CAUUAAGUUGUUGGGUAUU | 651 | 11721 | AAUACCCAACAACUUAAUG | 2302 |
| 11721 | UGGAGGUAAACCAUGUAUC | 652 | 11721 | UGGAGGUAAACCAUGUAUC | 652 | 11739 | GAUACAUGGUUUACCUCCA | 2303 |
| 11739 | CAAGGUUGCUACUGUACAG | 653 | 11739 | CAAGGUUGCUACUGUACAG | 653 | 11757 | CUGUACAGUAGCAACCUUG | 2304 |
| 11757 | GUCUAAAAUGUCUGACGUA | 654 | 11757 | GUCUAAAAUGUCUGACGUA | 654 | 11775 | UACGUCAGACAUUUUAGAC | 2305 |
| 11775 | AAAGUGCACAUCUGUGGUA | 655 | 11775 | AAAGUGCACAUCUGUGGUA | 655 | 11793 | UACCACAGAUGUGCACUUU | 2306 |
| 11793 | ACUGCUCUCGGUUCUUCAA | 656 | 11793 | ACUGCUCUCGGUUCUUCAA | 656 | 11811 | UUGAAGAACCGAGAGCAGU | 2307 |
| 11811 | ACAACUUAGAGUAGAGUCA | 657 | 11811 | ACAACUUAGAGUAGAGUCA | 657 | 11829 | UGACUCUACUCUAAGUUGU | 2308 |
| 11829 | AUCUUCUAAAUUGUGGGCA | 658 | 11829 | AUCUUCUAAAUUGUGGGCA | 658 | 11847 | UGCCCACAAUUUAGAAGAU | 2309 |
| 11847 | ACAAUGUGUACAACUCCAC | 659 | 11847 | ACAAUGUGUACAACUCCAC | 659 | 11865 | GUGGAGUUGUACACAUUGU | 2310 |
| 11865 | CAAUGAUAUUCUUCUUGCA | 660 | 11865 | CAAUGAUAUUCUUCUUGCA | 660 | 11883 | UGCAAGAAGAAUAUCAUUG | 2311 |
| 11883 | AAAAGACACAACUGAAGCU | 661 | 11883 | AAAAGACACAACUGAAGCU | 661 | 11901 | AGCUUCAGUUGUGUCUUUU | 2312 |
| 11901 | UUUCGAGAAGAUGGUUUCU | 662 | 11901 | UUUCGAGAAGAUGGUUUCU | 662 | 11919 | AGAAACCAUCUUCUCGAAA | 2313 |
| 11919 | UCUUUUGUCUGUUUUGCUA | 663 | 11919 | UCUUUUGUCUGUUUUGCUA | 663 | 11937 | UAGCAAAACAGACAAAAGA | 2314 |
| 11937 | AUCCAUGCAGGGUGCUGUA | 664 | 11937 | AUCCAUGCAGGGUGCUGUA | 664 | 11955 | UACAGCACCCUGCAUGGAU | 2315 |
| 11955 | AGACAUUAAUAGGUUGUGC | 665 | 11955 | AGACAUUAAUAGGUUGUGC | 665 | 11973 | GCACAACCUAUUAAUGUCU | 2316 |
| 11973 | CGAGGAAAUGCUCGAUAAC | 666 | 11973 | CGAGGAAAUGCUCGAUAAC | 666 | 11991 | GUUAUCGAGCAUUUCCUCG | 2317 |
| 11991 | CCGUGCUACUCUUCAGGCU | 667 | 11991 | CCGUGCUACUCUUCAGGCU | 667 | 12009 | AGCCUGAAGAGUAGCACGG | 2318 |
| 12009 | UAUUGCUUCAGAAUUUAGU | 668 | 12009 | UAUUGCUUCAGAAUUUAGU | 668 | 12027 | ACUAAAUUCUGAAGCAAUA | 2319 |
| 12027 | UUCUUUACCAUCAUAUGCC | 669 | 12027 | UUCUUUACCAUCAUAUGCC | 669 | 12045 | GGCAUAUGAUGGUAAAGAA | 2320 |
| 12045 | CGCUUAUGCCACUGCCCAG | 670 | 12045 | CGCUUAUGCCACUGCCCAG | 670 | 12063 | CUGGGCAGUGGCAUAAGCG | 2321 |
| 12063 | GGAGGCCUAUGAGCAGGCU | 671 | 12063 | GGAGGCCUAUGAGCAGGCU | 671 | 12081 | AGCCUGCUCAUAGGCCUCC | 2322 |
| 12081 | UGUAGCUAAUGGUGAUUCU | 672 | 12081 | UGUAGCUAAUGGUGAUUCU | 672 | 12099 | AGAAUCACCAUUAGCUACA | 2323 |
| 12099 | UGAAGUCGUUCUCAAAAAG | 673 | 12099 | UGAAGUCGUUCUCAAAAAG | 673 | 12117 | CUUUUUGAGAACGACUUCA | 2324 |
| 12117 | GUUAAAGAAAUCUUUGAAU | 674 | 12117 | GUUAAAGAAAUCUUUGAAU | 674 | 12135 | AUUCAAAGAUUUCUUUAAC | 2325 |
| 12135 | UGUGGCUAAAUCUGAGUUU | 675 | 12135 | UGUGGCUAAAUCUGAGUUU | 675 | 12153 | AAACUCAGAUUUAGCCACA | 2326 |
| 12153 | UGACCGUGAUGCUGCCAUG | 676 | 12153 | UGACCGUGAUGCUGCCAUG | 676 | 12171 | CAUGGCAGCAUCACGGUCA | 2327 |
| 12171 | GCAACGCAAGUUGGAAAAG | 677 | 12171 | GCAACGCAAGUUGGAAAAG | 677 | 12189 | CUUUUCCAACUUGCGUUGC | 2328 |
| 12189 | GAUGGCAGAUCAGGCUAUG | 678 | 12189 | GAUGGCAGAUCAGGCUAUG | 678 | 12207 | CAUAGCCUGAUCUGCCAUC | 2329 |
| 12207 | GACCCAAAUGUACAAACAG | 679 | 12207 | GACCCAAAUGUACAAACAG | 679 | 12225 | CUGUUUGUACAUUUGGGUC | 2330 |
| 12225 | GGCAAGAUCUGAGGACAAG | 680 | 12225 | GGCAAGAUCUGAGGACAAG | 680 | 12243 | CUUGUCCUCAGAUCUUGCC | 2331 |
| 12243 | GAGGGCAAAAGUAACUAGU | 681 | 12243 | GAGGGCAAAAGUAACUAGU | 681 | 12261 | ACUAGUUACUUUUGCCCUC | 2332 |
| 12261 | UGCUAUGCAAACAAUGCUC | 682 | 12261 | UGCUAUGCAAACAAUGCUC | 682 | 12279 | GAGCAUUGUUUGCAUAGCA | 2333 |
| 12279 | CUUCACUAUGCUUAGGAAG | 683 | 12279 | CUUCACUAUGCUUAGGAAG | 683 | 12297 | CUUCCUAAGCAUAGUGAAG | 2334 |
| 12297 | GCUUGAUAAUGAUGCACUU | 684 | 12297 | GCUUGAUAAUGAUGCACUU | 684 | 12315 | AAGUGCAUCAUUAUCAAGC | 2335 |
| 12315 | UAACAACAUUAUCAACAAU | 685 | 12315 | UAACAACAUUAUCAACAAU | 685 | 12333 | AUUGUUGAUAAUGUUGUUA | 2336 |
| 12333 | UGCGCGUGAUGGUUGUGUU | 686 | 12333 | UGCGCGUGAUGGUUGUGUU | 686 | 12351 | AACACAACCAUCACGCGCA | 2337 |
| 12351 | UCCACUCAACAUCAUACCA | 687 | 12351 | UCCACUCAACAUCAUACCA | 687 | 12369 | UGGUAUGAUGUUGAGUGGA | 2338 |
| 12369 | AUUGACUACAGCAGCCAAA | 688 | 12369 | AUUGACUACAGCAGCCAAA | 688 | 12387 | UUUGGCUGCUGUAGUCAAU | 2339 |
| 12387 | ACUCAUGGUUGUUGUCCCU | 689 | 12387 | ACUCAUGGUUGUUGUCCCU | 689 | 12405 | AGGGACAACAACCAUGAGU | 2340 |
| 12405 | UGAUUAUGGUACCUACAAG | 690 | 12405 | UGAUUAUGGUACCUACAAG | 690 | 12423 | CUUGUAGGUACCAUAAUCA | 2341 |
| 12423 | GAACACUUGUGAUGGUAAC | 691 | 12423 | GAACACUUGUGAUGGUAAC | 691 | 12441 | GUUACCAUCACAAGUGUUC | 2342 |
| 12441 | CACCUUUACAUAUGCAUCU | 692 | 12441 | CACCUUUACAUAUGCAUCU | 692 | 12459 | AGAUGCAUAUGUAAAGGUG | 2343 |
| 12459 | UGCACUCUGGGAAAUCCAG | 693 | 12459 | UGCACUCUGGGAAAUCCAG | 693 | 12477 | CUGGAUUUCCCAGAGUGCA | 2344 |
| 12477 | GCAAGUUGUUGAUGCGGAU | 694 | 12477 | GCAAGUUGUUGAUGCGGAU | 694 | 12495 | AUCCGCAUCAACAACUUGC | 2345 |
| 12495 | UAGCAAGAUUGUUCAACUU | 695 | 12495 | UAGCAAGAUUGUUCAACUU | 695 | 12513 | AAGUUGAACAAUCUUGCUA | 2346 |
| 12513 | UAGUGAAAUUAACAUGGAC | 696 | 12513 | UAGUGAAAUUAACAUGGAC | 696 | 12531 | GUCCAUGUUAAUUUCACUA | 2347 |
| 12531 | CAAUUCACCAAAUUUGGCU | 697 | 12531 | CAAUUCACCAAAUUUGGCU | 697 | 12549 | AGCCAAAUUUGGUGAAUUG | 2348 |
| 12549 | UUGGCCUCUUAUUGUUACA | 698 | 12549 | UUGGCCUCUUAUUGUUACA | 698 | 12567 | UGUAACAAUAAGAGGCCAA | 2349 |
| 12567 | AGCUCUAAGAGCCAACUCA | 699 | 12567 | AGCUCUAAGAGCCAACUCA | 699 | 12585 | UGAGUUGGCUCUUAGAGCU | 2350 |
| 12585 | AGCUGUUAAACUACAGAAU | 700 | 12585 | AGCUGUUAAACUACAGAAU | 700 | 12603 | AUUCUGUAGUUUAACAGCU | 2351 |
| 12603 | UAAUGAACUGAGUCCAGUA | 701 | 12603 | UAAUGAACUGAGUCCAGUA | 701 | 12621 | UACUGGACUCAGUUCAUUA | 2352 |
| 12621 | AGCACUACGACAGAUGUCC | 702 | 12621 | AGCACUACGACAGAUGUCC | 702 | 12639 | GGACAUCUGUCGUAGUGCU | 2353 |
| 12639 | CUGUGCGGCUGGUACCACA | 703 | 12639 | CUGUGCGGCUGGUACCACA | 703 | 12657 | UGUGGUACCAGCCGCACAG | 2354 |
| 12657 | ACAAACAGCUUGUACUGAU | 704 | 12657 | ACAAACAGCUUGUACUGAU | 704 | 12675 | AUCAGUACAAGCUGUUUGU | 2355 |
| 12675 | UGACAAUGCACUUGCCUAC | 705 | 12675 | UGACAAUGCACUUGCCUAC | 705 | 12693 | GUAGGCAAGUGCAUUGUCA | 2356 |
| 12693 | CUAUAACAAUUCGAAGGGA | 706 | 12693 | CUAUAACAAUUCGAAGGGA | 706 | 12711 | UCCCUUCGAAUUGUUAUAG | 2357 |
| 12711 | AGGUAGGUUUGUGCUGGCA | 707 | 12711 | AGGUAGGUUUGUGCUGGCA | 707 | 12729 | UGCCAGCACAAACCUACCU | 2358 |
| 12729 | AUUACUAUCAGACCACCAA | 708 | 12729 | AUUACUAUCAGACCACCAA | 708 | 12747 | UUGGUGGUCUGAUAGUAAU | 2359 |
| 12747 | AGAUCUCAAAUGGGCUAGA | 709 | 12747 | AGAUCUCAAAUGGGCUAGA | 709 | 12765 | UCUAGCCCAUUUGAGAUCU | 2360 |
| 12765 | AUUCCCUAAGAGUGAUGGU | 710 | 12765 | AUUCCCUAAGAGUGAUGGU | 710 | 12783 | ACCAUCACUCUUAGGGAAU | 2361 |
| 12783 | UACAGGUACAAUUUACACA | 711 | 12783 | UACAGGUACAAUUUACACA | 711 | 12801 | UGUGUAAAUUGUACCUGUA | 2362 |
| 12801 | AGAACUGGAACCACCUUGU | 712 | 12801 | AGAACUGGAACCACCUUGU | 712 | 12819 | ACAAGGUGGUUCCAGUUCU | 2363 |
| 12819 | UAGGUUUGUUACAGACACA | 713 | 12819 | UAGGUUUGUUACAGACACA | 713 | 12837 | UGUGUCUGUAACAAACCUA | 2364 |
| 12837 | ACCAAAAGGGCCUAAAGUG | 714 | 12837 | ACCAAAAGGGCCUAAAGUG | 714 | 12855 | CACUUUAGGCCCUUUUGGU | 2365 |
| 12855 | GAAAUACUUGUACUUCAUC | 715 | 12855 | GAAAUACUUGUACUUCAUC | 715 | 12873 | GAUGAAGUACAAGUAUUUC | 2366 |
| 12873 | CAAAGGCUUAAACAACCUA | 716 | 12873 | CAAAGGCUUAAACAACCUA | 716 | 12891 | UAGGUUGUUUAAGCCUUUG | 2367 |
| 12891 | AAAUAGAGGUAUGGUGCUG | 717 | 12891 | AAAUAGAGGUAUGGUGCUG | 717 | 12909 | CAGCACCAUACCUCUAUUU | 2368 |
| 12909 | GGGCAGUUUAGCUGCUACA | 718 | 12909 | GGGCAGUUUAGCUGCUACA | 718 | 12927 | UGUAGCAGCUAAACUGCCC | 2369 |
| 12927 | AGUACGUCUUCAGGCUGGA | 719 | 12927 | AGUACGUCUUCAGGCUGGA | 719 | 12945 | UCCAGCCUGAAGACGUACU | 2370 |
| 12945 | AAAUGCUACAGAAGUACCU | 720 | 12945 | AAAUGCUACAGAAGUACCU | 720 | 12963 | AGGUACUUCUGUAGCAUUU | 2371 |
| 12963 | UGCCAAUUCAACUGUGCUU | 721 | 12963 | UGCCAAUUCAACUGUGCUU | 721 | 12981 | AAGCACAGUUGAAUUGGCA | 2372 |
| 12981 | UUCCUUCUGUGCUUUUGCA | 722 | 12981 | UUCCUUCUGUGCUUUUGCA | 722 | 12999 | UGCAAAAGCACAGAAGGAA | 2373 |
| 12999 | AGUAGACCCUGCUAAAGCA | 723 | 12999 | AGUAGACCCUGCUAAAGCA | 723 | 13017 | UGCUUUAGCAGGGUCUACU | 2374 |
| 13017 | AUAUAAGGAUUACCUAGCA | 724 | 13017 | AUAUAAGGAUUACCUAGCA | 724 | 13035 | UGCUAGGUAAUCCUUAUAU | 2375 |
| 13035 | AAGUGGAGGACAACCAAUC | 725 | 13035 | AAGUGGAGGACAACCAAUC | 725 | 13053 | GAUUGGUUGUCCUCCACUU | 2376 |
| 13053 | CACCAACUGUGUGAAGAUG | 726 | 13053 | CACCAACUGUGUGAAGAUG | 726 | 13071 | CAUCUUCACACAGUUGGUG | 2377 |
| 13071 | GUUGUGUACACACACUGGU | 727 | 13071 | GUUGUGUACACACACUGGU | 727 | 13089 | ACCAGUGUGUGUACACAAC | 2378 |
| 13089 | UACAGGACAGGCAAUUACU | 728 | 13089 | UACAGGACAGGCAAUUACU | 728 | 13107 | AGUAAUUGCCUGUCCUGUA | 2379 |
| 13107 | UGUAACACCAGAAGCUAAC | 729 | 13107 | UGUAACACCAGAAGCUAAC | 729 | 13125 | GUUAGCUUCUGGUGUUACA | 2380 |
| 13125 | CAUGGACCAAGAGUCCUUU | 730 | 13125 | CAUGGACCAAGAGUCCUUU | 730 | 13143 | AAAGGACUCUUGGUCCAUG | 2381 |
| 13143 | UGGUGGUGCUUCAUGUUGU | 731 | 13143 | UGGUGGUGCUUCAUGUUGU | 731 | 13161 | ACAACAUGAAGCACCACCA | 2382 |
| 13161 | UCUGUAUUGUAGAUGCCAC | 732 | 13161 | UCUGUAUUGUAGAUGCCAC | 732 | 13179 | GUGGCAUCUACAAUACAGA | 2383 |
| 13179 | CAUUGACCAUCCAAAUCCU | 733 | 13179 | CAUUGACCAUCCAAAUCCU | 733 | 13197 | AGGAUUUGGAUGGUCAAUG | 2384 |
| 13197 | UAAAGGAUUCUGUGACUUG | 734 | 13197 | UAAAGGAUUCUGUGACUUG | 734 | 13215 | CAAGUCACAGAAUCCUUUA | 2385 |
| 13215 | GAAAGGUAAGUACGUCCAA | 735 | 13215 | GAAAGGUAAGUACGUCCAA | 735 | 13233 | UUGGACGUACUUACCUUUC | 2386 |
| 13233 | AAUACCUACCACUUGUGCU | 736 | 13233 | AAUACCUACCACUUGUGCU | 736 | 13251 | AGCACAAGUGGUAGGUAUU | 2387 |
| 13251 | UAAUGACCCAGUGGGUUUU | 737 | 13251 | UAAUGACCCAGUGGGUUUU | 737 | 13269 | AAAACCCACUGGGUCAUUA | 2388 |
| 13269 | UACACUUAGAAACACAGUC | 738 | 13269 | UACACUUAGAAACACAGUC | 738 | 13287 | GACUGUGUUUCUAAGUGUA | 2389 |
| 13287 | CUGUACCGUCUGCGGAAUG | 739 | 13287 | CUGUACCGUCUGCGGAAUG | 739 | 13305 | CAUUCCGCAGACGGUACAG | 2390 |
| 13305 | GUGGAAAGGUUAUGGCUGU | 740 | 13305 | GUGGAAAGGUUAUGGCUGU | 740 | 13323 | ACAGCCAUAACCUUUCCAC | 2391 |
| 13323 | UAGUUGUGACCAACUCCGC | 741 | 13323 | UAGUUGUGACCAACUCCGC | 741 | 13341 | GCGGAGUUGGUCACAACUA | 2392 |
| 13341 | CGAACCCUUGAUGCAGUCU | 742 | 13341 | CGAACCCUUGAUGCAGUCU | 742 | 13359 | AGACUGCAUCAAGGGUUCG | 2393 |
| 13359 | UGCGGAUGCAUCAACGUUU | 743 | 13359 | UGCGGAUGCAUCAACGUUU | 743 | 13377 | AAACGUUGAUGCAUCCGCA | 2394 |
| 13377 | UUUAAACGGGUUUGCGGUG | 744 | 13377 | UUUAAACGGGUUUGCGGUG | 744 | 13395 | CACCGCAAACCCGUUUAAA | 2395 |
| 13395 | GUAAGUGCAGCCCGUCUUA | 745 | 13395 | GUAAGUGCAGCCCGUCUUA | 745 | 13413 | UAAGACGGGCUGCACUUAC | 2396 |
| 13413 | ACACCGUGCGGCACAGGCA | 746 | 13413 | ACACCGUGCGGCACAGGCA | 746 | 13431 | UGCCUGUGCCGCACGGUGU | 2397 |
| 13431 | ACUAGUACUGAUGUCGUCU | 747 | 13431 | ACUAGUACUGAUGUCGUCU | 747 | 13449 | AGACGACAUCAGUACUAGU | 2398 |
| 13449 | UACAGGGCUUUUGAUAUUU | 748 | 13449 | UACAGGGCUUUUGAUAUUU | 748 | 13467 | AAAUAUCAAAAGCCCUGUA | 2399 |
| 13467 | UACAACGAAAAAGUUGCUG | 749 | 13467 | UACAACGAAAAAGUUGCUG | 749 | 13485 | CAGCAACUUUUUCGUUGUA | 2400 |
| 13485 | GGUUUUGCAAAGUUCCUAA | 750 | 13485 | GGUUUUGCAAAGUUCCUAA | 750 | 13503 | UUAGGAACUUUGCAAAACC | 2401 |
| 13503 | AAAACUAAUUGCUGUCGCU | 751 | 13503 | AAAACUAAUUGCUGUCGCU | 751 | 13521 | AGCGACAGCAAUUAGUUUU | 2402 |
| 13521 | UUCCAGGAGAAGGAUGAGG | 752 | 13521 | UUCCAGGAGAAGGAUGAGG | 752 | 13539 | CCUCAUCCUUCUCCUGGAA | 2403 |
| 13539 | GAAGGCAAUUUAUUAGACU | 753 | 13539 | GAAGGCAAUUUAUUAGACU | 753 | 13557 | AGUCUAAUAAAUUGCCUUC | 2404 |
| 13557 | UCUUACUUUGUAGUUAAGA | 754 | 13557 | UCUUACUUUGUAGUUAAGA | 754 | 13575 | UCUUAACUACAAAGUAAGA | 2405 |
| 13575 | AGGCAUACUAUGUCUAACU | 755 | 13575 | AGGCAUACUAUGUCUAACU | 755 | 13593 | AGUUAGACAUAGUAUGCCU | 2406 |
| 13593 | UACCAACAUGAAGAGACUA | 756 | 13593 | UACCAACAUGAAGAGACUA | 756 | 13611 | UAGUCUCUUCAUGUUGGUA | 2407 |
| 13611 | AUUUAUAACUUGGUUAAAG | 757 | 13611 | AUUUAUAACUUGGUUAAAG | 757 | 13629 | CUUUAACCAAGUUAUAAAU | 2408 |
| 13629 | GAUUGUCCAGCGGUUGCUG | 758 | 13629 | GAUUGUCCAGCGGUUGCUG | 758 | 13647 | CAGCAACCGCUGGACAAUC | 2409 |
| 13647 | GUCCAUGACUUUUUCAAGU | 759 | 13647 | GUCCAUGACUUUUUCAAGU | 759 | 13665 | ACUUGAAAAAGUCAUGGAC | 2410 |
| 13665 | UUUAGAGUAGAUGGUGACA | 760 | 13665 | UUUAGAGUAGAUGGUGACA | 760 | 13683 | UGUCACCAUCUACUCUAAA | 2411 |
| 13683 | AUGGUACCACAUAUAUCAC | 761 | 13683 | AUGGUACCACAUAUAUCAC | 761 | 13701 | GUGAUAUAUGUGGUACCAU | 2412 |
| 13701 | CGUCAGCGUCUAACUAAAU | 762 | 13701 | CGUCAGCGUCUAACUAAAU | 762 | 13719 | AUUUAGUUAGACGCUGACG | 2413 |
| 13719 | UACACAAUGGCUGAUUUAG | 763 | 13719 | UACACAAUGGCUGAUUUAG | 763 | 13737 | CUAAAUCAGCCAUUGUGUA | 2414 |
| 13737 | GUCUAUGCUCUACGUCAUU | 764 | 13737 | GUCUAUGCUCUACGUCAUU | 764 | 13755 | AAUGACGUAGAGCAUAGAC | 2415 |
| 13755 | UUUGAUGAGGGUAAUUGUG | 765 | 13755 | UUUGAUGAGGGUAAUUGUG | 765 | 13773 | CACAAUUACCCUCAUCAAA | 2416 |
| 13773 | GAUACAUUAAAAGAAAUAC | 766 | 13773 | GAUACAUUAAAAGAAAUAC | 766 | 13791 | GUAUUUCUUUUAAUGUAUC | 2417 |
| 13791 | CUCGUCACAUACAAUUGCU | 767 | 13791 | CUCGUCACAUACAAUUGCU | 767 | 13809 | AGCAAUUGUAUGUGACGAG | 2418 |
| 13809 | UGUGAUGAUGAUUAUUUCA | 768 | 13809 | UGUGAUGAUGAUUAUUUCA | 768 | 13827 | UGAAAUAAUCAUCAUCACA | 2419 |
| 13827 | AAUAAGAAGGAUUGGUAUG | 769 | 13827 | AAUAAGAAGGAUUGGUAUG | 769 | 13845 | CAUACCAAUCCUUCUUAUU | 2420 |
| 13845 | GACUUCGUAGAGAAUCCUG | 770 | 13845 | GACUUCGUAGAGAAUCCUG | 770 | 13863 | CAGGAUUCUCUACGAAGUC | 2421 |
| 13863 | GACAUCUUACGCGUAUAUG | 771 | 13863 | GACAUCUUACGCGUAUAUG | 771 | 13881 | CAUAUACGCGUAAGAUGUC | 2422 |
| 13881 | GCUAACUUAGGUGAGCGUG | 772 | 13881 | GCUAACUUAGGUGAGCGUG | 772 | 13899 | CACGCUCACCUAAGUUAGC | 2423 |
| 13899 | GUACGCCAAUCAUUAUUAA | 773 | 13899 | GUACGCCAAUCAUUAUUAA | 773 | 13917 | UUAAUAAUGAUUGGCGUAC | 2424 |
| 13917 | AAGACUGUACAAUUCUGCG | 774 | 13917 | AAGACUGUACAAUUCUGCG | 774 | 13935 | CGCAGAAUUGUACAGUCUU | 2425 |
| 13935 | GAUGCUAUGCGUGAUGCAG | 775 | 13935 | GAUGCUAUGCGUGAUGCAG | 775 | 13953 | CUGCAUCACGCAUAGCAUC | 2426 |
| 13953 | GGCAUUGUAGGCGUACUGA | 776 | 13953 | GGCAUUGUAGGCGUACUGA | 776 | 13971 | UCAGUACGCCUACAAUGCC | 2427 |
| 13971 | ACAUUAGAUAAUCAGGAUC | 777 | 13971 | ACAUUAGAUAAUCAGGAUC | 777 | 13989 | GAUCCUGAUUAUCUAAUGU | 2428 |
| 13989 | CUUAAUGGGAACUGGUACG | 778 | 13989 | CUUAAUGGGAACUGGUACG | 778 | 14007 | CGUACCAGUUCCCAUUAAG | 2429 |
| 14007 | GAUUUCGGUGAUUUCGUAC | 779 | 14007 | GAUUUCGGUGAUUUCGUAC | 779 | 14025 | GUACGAAAUCACCGAAAUC | 2430 |
| 14025 | CAAGUAGCACCAGGCUGCG | 780 | 14025 | CAAGUAGCACCAGGCUGCG | 780 | 14043 | CGCAGCCUGGUGCUACUUG | 2431 |
| 14043 | GGAGUUCCUAUUGUGGAUU | 781 | 14043 | GGAGUUCCUAUUGUGGAUU | 781 | 14061 | AAUCCACAAUAGGAACUCC | 2432 |
| 14061 | UCAUAUUACUCAUUGCUGA | 782 | 14061 | UCAUAUUACUCAUUGCUGA | 782 | 14079 | UCAGCAAUGAGUAAUAUGA | 2433 |
| 14079 | AUGCCCAUCCUCACUUUGA | 783 | 14079 | AUGCCCAUCCUCACUUUGA | 783 | 14097 | UCAAAGUGAGGAUGGGCAU | 2434 |
| 14097 | ACUAGGGCAUUGGCUGCUG | 784 | 14097 | ACUAGGGCAUUGGCUGCUG | 784 | 14115 | CAGCAGCCAAUGCCCUAGU | 2435 |
| 14115 | GAGUCCCAUAUGGAUGCUG | 785 | 14115 | GAGUCCCAUAUGGAUGCUG | 785 | 14133 | CAGCAUCCAUAUGGGACUC | 2436 |
| 14133 | GAUCUCGCAAAACCACUUA | 786 | 14133 | GAUCUCGCAAAACCACUUA | 786 | 14151 | UAAGUGGUUUUGCGAGAUC | 2437 |
| 14151 | AUUAAGUGGGAUUUGCUGA | 787 | 14151 | AUUAAGUGGGAUUUGCUGA | 787 | 14169 | UCAGCAAAUCCCACUUAAU | 2438 |
| 14169 | AAAUAUGAUUUUACGGAAG | 788 | 14169 | AAAUAUGAUUUUACGGAAG | 788 | 14187 | CUUCCGUAAAAUCAUAUUU | 2439 |
| 14187 | GAGAGACUUUGUCUCUUCG | 789 | 14187 | GAGAGACUUUGUCUCUUCG | 789 | 14205 | CGAAGAGACAAAGUCUCUC | 2440 |
| 14205 | GACCGUUAUUUUAAAUAUU | 790 | 14205 | GACCGUUAUUUUAAAUAUU | 790 | 14223 | AAUAUUUAAAAUAACGGUC | 2441 |
| 14223 | UGGGACCAGACAUACCAUC | 791 | 14223 | UGGGACCAGACAUACCAUC | 791 | 14241 | GAUGGUAUGUCUGGUCCCA | 2442 |
| 14241 | CCCAAUUGUAUUAACUGUU | 792 | 14241 | CCCAAUUGUAUUAACUGUU | 792 | 14259 | AACAGUUAAUACAAUUGGG | 2443 |
| 14259 | UUGGAUGAUAGGUGUAUCC | 793 | 14259 | UUGGAUGAUAGGUGUAUCC | 793 | 14277 | GGAUACACCUAUCAUCCAA | 2444 |
| 14277 | CUUCAUUGUGCAAACUUUA | 794 | 14277 | CUUCAUUGUGCAAACUUUA | 794 | 14295 | UAAAGUUUGCACAAUGAAG | 2445 |
| 14295 | AAUGUGUUAUUUUCUACUG | 795 | 14295 | AAUGUGUUAUUUUCUACUG | 795 | 14313 | CAGUAGAAAAUAACACAUU | 2446 |
| 14313 | GUGUUUCCACCUACAAGUU | 796 | 14313 | GUGUUUCCACCUACAAGUU | 796 | 14331 | AACUUGUAGGUGGAAACAC | 2447 |
| 14331 | UUUGGACCACUAGUAAGAA | 797 | 14331 | UUUGGACCACUAGUAAGAA | 797 | 14349 | UUCUUACUAGUGGUCCAAA | 2448 |
| 14349 | AAAAUAUUUGUAGAUGGUG | 798 | 14349 | AAAAUAUUUGUAGAUGGUG | 798 | 14367 | CACCAUCUACAAAUAUUUU | 2449 |
| 14367 | GUUCCUUUUGUUGUUUCAA | 799 | 14367 | GUUCCUUUUGUUGUUUCAA | 799 | 14385 | UUGAAACAACAAAAGGAAC | 2450 |
| 14385 | ACUGGAUACCAUUUUCGUG | 800 | 14385 | ACUGGAUACCAUUUUCGUG | 800 | 14403 | CACGAAAAUGGUAUCCAGU | 2451 |
| 14403 | GAGUUAGGAGUCGUACAUA | 801 | 14403 | GAGUUAGGAGUCGUACAUA | 801 | 14421 | UAUGUACGACUCCUAACUC | 2452 |
| 14421 | AAUCAGGAUGUAAACUUAC | 802 | 14421 | AAUCAGGAUGUAAACUUAC | 802 | 14439 | GUAAGUUUACAUCCUGAUU | 2453 |
| 14439 | CAUAGCUCGCGUCUCAGUU | 803 | 14439 | CAUAGCUCGCGUCUCAGUU | 803 | 14457 | AACUGAGACGCGAGCUAUG | 2454 |
| 14457 | UUCAAGGAACUUUUAGUGU | 804 | 14457 | UUCAAGGAACUUUUAGUGU | 804 | 14475 | ACACUAAAAGUUCCUUGAA | 2455 |
| 14475 | UAUGCUGCUGAUCCAGCUA | 805 | 14475 | UAUGCUGCUGAUCCAGCUA | 805 | 14493 | UAGCUGGAUCAGCAGCAUA | 2456 |
| 14493 | AUGCAUGCAGCUUCUGGCA | 806 | 14493 | AUGCAUGCAGCUUCUGGCA | 806 | 14511 | UGCCAGAAGCUGCAUGCAU | 2457 |
| 14511 | AAUUUAUUGCUAGAUAAAC | 807 | 14511 | AAUUUAUUGCUAGAUAAAC | 807 | 14529 | GUUUAUCUAGCAAUAAAUU | 2458 |
| 14529 | CGCACUACAUGCUUUUCAG | 808 | 14529 | CGCACUACAUGCUUUUCAG | 808 | 14547 | CUGAAAAGCAUGUAGUGCG | 2459 |
| 14547 | GUAGCUGCACUAACAAACA | 809 | 14547 | GUAGCUGCACUAACAAACA | 809 | 14565 | UGUUUGUUAGUGCAGCUAC | 2460 |
| 14565 | AAUGUUGCUUUUCAAACUG | 810 | 14565 | AAUGUUGCUUUUCAAACUG | 810 | 14583 | CAGUUUGAAAAGCAACAUU | 2461 |
| 14583 | GUCAAACCCGGUAAUUUUA | 811 | 14583 | GUCAAACCCGGUAAUUUUA | 811 | 14601 | UAAAAUUACCGGGUUUGAC | 2462 |
| 14601 | AAUAAAGACUUUUAUGACU | 812 | 14601 | AAUAAAGACUUUUAUGACU | 812 | 14619 | AGUCAUAAAAGUCUUUAUU | 2463 |
| 14619 | UUUGCUGUGUCUAAAGGUU | 813 | 14619 | UUUGCUGUGUCUAAAGGUU | 813 | 14637 | AACCUUUAGACACAGCAAA | 2464 |
| 14637 | UUCUUUAAGGAAGGAAGUU | 814 | 14637 | UUCUUUAAGGAAGGAAGUU | 814 | 14655 | AACUUCCUUCCUUAAAGAA | 2465 |
| 14655 | UCUGUUGAACUAAAACACU | 815 | 14655 | UCUGUUGAACUAAAACACU | 815 | 14673 | AGUGUUUUAGUUCAACAGA | 2466 |
| 14673 | UUCUUCUUUGCUCAGGAUG | 816 | 14673 | UUCUUCUUUGCUCAGGAUG | 816 | 14691 | CAUCCUGAGCAAAGAAGAA | 2467 |
| 14691 | GGCAACGCUGCUAUCAGUG | 817 | 14691 | GGCAACGCUGCUAUCAGUG | 817 | 14709 | CACUGAUAGCAGCGUUGCC | 2468 |
| 14709 | GAUUAUGACUAUUAUCGUU | 818 | 14709 | GAUUAUGACUAUUAUCGUU | 818 | 14727 | AACGAUAAUAGUCAUAAUC | 2469 |
| 14727 | UAUAAUCUGCCAACAAUGU | 819 | 14727 | UAUAAUCUGCCAACAAUGU | 819 | 14745 | ACAUUGUUGGCAGAUUAUA | 2470 |
| 14745 | UGUGAUAUCAGACAACUCC | 820 | 14745 | UGUGAUAUCAGACAACUCC | 820 | 14763 | GGAGUUGUCUGAUAUCACA | 2471 |
| 14763 | CUAUUCGUAGUUGAAGUUG | 821 | 14763 | CUAUUCGUAGUUGAAGUUG | 821 | 14781 | CAACUUCAACUACGAAUAG | 2472 |
| 14781 | GUUGAUAAAUACUUUGAUU | 822 | 14781 | GUUGAUAAAUACUUUGAUU | 822 | 14799 | AAUCAAAGUAUUUAUCAAC | 2473 |
| 14799 | UGUUACGAUGGUGGCUGUA | 823 | 14799 | UGUUACGAUGGUGGCUGUA | 823 | 14817 | UACAGCCACCAUCGUAACA | 2474 |
| 14817 | AUUAAUGCCAACCAAGUAA | 824 | 14817 | AUUAAUGCCAACCAAGUAA | 824 | 14835 | UUACUUGGUUGGCAUUAAU | 2475 |
| 14835 | AUCGUUAACAAUCUGGAUA | 825 | 14835 | AUCGUUAACAAUCUGGAUA | 825 | 14853 | UAUCCAGAUUGUUAACGAU | 2476 |
| 14853 | AAAUCAGCUGGUUUCCCAU | 826 | 14853 | AAAUCAGCUGGUUUCCCAU | 826 | 14871 | AUGGGAAACCAGCUGAUUU | 2477 |
| 14871 | UUUAAUAAAUGGGGUAAGG | 827 | 14871 | UUUAAUAAAUGGGGUAAGG | 827 | 14889 | CCUUACCCCAUUUAUUAAA | 2478 |
| 14889 | GCUAGACUUUAUUAUGACU | 828 | 14889 | GCUAGACUUUAUUAUGACU | 828 | 14907 | AGUCAUAAUAAAGUCUAGC | 2479 |
| 14907 | UCAAUGAGUUAUGAGGAUC | 829 | 14907 | UCAAUGAGUUAUGAGGAUC | 829 | 14925 | GAUCCUCAUAACUCAUUGA | 2480 |
| 14925 | CAAGAUGCACUUUUCGCGU | 830 | 14925 | CAAGAUGCACUUUUCGCGU | 830 | 14943 | ACGCGAAAAGUGCAUCUUG | 2481 |
| 14943 | UAUACUAAGCGUAAUGUCA | 831 | 14943 | UAUACUAAGCGUAAUGUCA | 831 | 14961 | UGACAUUACGCUUAGUAUA | 2482 |
| 14961 | AUCCCUACUAUAACUCAAA | 832 | 14961 | AUCCCUACUAUAACUCAAA | 832 | 14979 | UUUGAGUUAUAGUAGGGAU | 2483 |
| 14979 | AUGAAUCUUAAGUAUGCCA | 833 | 14979 | AUGAAUCUUAAGUAUGCCA | 833 | 14997 | UGGCAUACUUAAGAUUCAU | 2484 |
| 14997 | AUUAGUGCAAAGAAUAGAG | 834 | 14997 | AUUAGUGCAAAGAAUAGAG | 834 | 15015 | CUCUAUUCUUUGCACUAAU | 2485 |
| 15015 | GCUCGCACCGUAGCUGGUG | 835 | 15015 | GCUCGCACCGUAGCUGGUG | 835 | 15033 | CACCAGCUACGGUGCGAGC | 2486 |
| 15033 | GUCUCUAUCUGUAGUACUA | 836 | 15033 | GUCUCUAUCUGUAGUACUA | 836 | 15051 | UAGUACUACAGAUAGAGAC | 2487 |
| 15051 | AUGACAAAUAGACAGUUUC | 837 | 15051 | AUGACAAAUAGACAGUUUC | 837 | 15069 | GAAACUGUCUAUUUGUCAU | 2488 |
| 15069 | CAUCAGAAAUUAUUGAAGU | 838 | 15069 | CAUCAGAAAUUAUUGAAGU | 838 | 15087 | ACUUCAAUAAUUUCUGAUG | 2489 |
| 15087 | UCAAUAGCCGCCACUAGAG | 839 | 15087 | UCAAUAGCCGCCACUAGAG | 839 | 15105 | CUCUAGUGGCGGCUAUUGA | 2490 |
| 15105 | GGAGCUACUGUGGUAAUUG | 840 | 15105 | GGAGCUACUGUGGUAAUUG | 840 | 15123 | CAAUUACCACAGUAGCUCC | 2491 |
| 15123 | GGAACAAGCAAGUUUUACG | 841 | 15123 | GGAACAAGCAAGUUUUACG | 841 | 15141 | CGUAAAACUUGCUUGUUCC | 2492 |
| 15141 | GGUGGCUGGCAUAAUAUGU | 842 | 15141 | GGUGGCUGGCAUAAUAUGU | 842 | 15159 | ACAUAUUAUGCCAGCCACC | 2493 |
| 15159 | UUAAAAACUGUUUACAGUG | 843 | 15159 | UUAAAAACUGUUUACAGUG | 843 | 15177 | CACUGUAAACAGUUUUUAA | 2494 |
| 15177 | GAUGUAGAAACUCCACACC | 844 | 15177 | GAUGUAGAAACUCCACACC | 844 | 15195 | GGUGUGGAGUUUCUACAUC | 2495 |
| 15195 | CUUAUGGGUUGGGAUUAUC | 845 | 15195 | CUUAUGGGUUGGGAUUAUC | 845 | 15213 | GAUAAUCCCAACCCAUAAG | 2496 |
| 15213 | CCAAAAUGUGACAGAGCCA | 846 | 15213 | CCAAAAUGUGACAGAGCCA | 846 | 15231 | UGGCUCUGUCACAUUUUGG | 2497 |
| 15231 | AUGCCUAACAUGCUUAGGA | 847 | 15231 | AUGCCUAACAUGCUUAGGA | 847 | 15249 | UCCUAAGCAUGUUAGGCAU | 2498 |
| 15249 | AUAAUGGCCUCUCUUGUUC | 848 | 15249 | AUAAUGGCCUCUCUUGUUC | 848 | 15267 | GAACAAGAGAGGCCAUUAU | 2499 |
| 15267 | CUUGCUCGCAAACAUAACA | 849 | 15267 | CUUGCUCGCAAACAUAACA | 849 | 15285 | UGUUAUGUUUGCGAGCAAG | 2500 |
| 15285 | ACUUGCUGUAACUUAUCAC | 850 | 15285 | ACUUGCUGUAACUUAUCAC | 850 | 15303 | GUGAUAAGUUACAGCAAGU | 2501 |
| 15303 | CACCGUUUCUACAGGUUAG | 851 | 15303 | CACCGUUUCUACAGGUUAG | 851 | 15321 | CUAACCUGUAGAAACGGUG | 2502 |
| 15321 | GCUAACGAGUGUGCGCAAG | 852 | 15321 | GCUAACGAGUGUGCGCAAG | 852 | 15339 | CUUGCGCACACUCGUUAGC | 2503 |
| 15339 | GUAUUAAGUGAGAUGGUCA | 853 | 15339 | GUAUUAAGUGAGAUGGUCA | 853 | 15357 | UGACCAUCUCACUUAAUAC | 2504 |
| 15357 | AUGUGUGGCGGCUCACUAU | 854 | 15357 | AUGUGUGGCGGCUCACUAU | 854 | 15375 | AUAGUGAGCCGCCACACAU | 2505 |
| 15375 | UAUGUUAAACCAGGUGGAA | 855 | 15375 | UAUGUUAAACCAGGUGGAA | 855 | 15393 | UUCCACCUGGUUUAACAUA | 2506 |
| 15393 | ACAUCAUCCGGUGAUGCUA | 856 | 15393 | ACAUCAUCCGGUGAUGCUA | 856 | 15411 | UAGCAUCACCGGAUGAUGU | 2507 |
| 15411 | ACAACUGCUUAUGCUAAUA | 857 | 15411 | ACAACUGCUUAUGCUAAUA | 857 | 15429 | UAUUAGCAUAAGCAGUUGU | 2508 |
| 15429 | AGUGUCUUUAACAUUUGUC | 858 | 15429 | AGUGUCUUUAACAUUUGUC | 858 | 15447 | GACAAAUGUUAAAGACACU | 2509 |
| 15447 | CAAGCUGUUACAGCCAAUG | 859 | 15447 | CAAGCUGUUACAGCCAAUG | 859 | 15465 | CAUUGGCUGUAACAGCUUG | 2510 |
| 15465 | GUAAAUGCACUUCUUUCAA | 860 | 15465 | GUAAAUGCACUUCUUUCAA | 860 | 15483 | UUGAAAGAAGUGCAUUUAC | 2511 |
| 15483 | ACUGAUGGUAAUAAGAUAG | 861 | 15483 | ACUGAUGGUAAUAAGAUAG | 861 | 15501 | CUAUCUUAUUACCAUCAGU | 2512 |
| 15501 | GCUGACAAGUAUGUCCGCA | 862 | 15501 | GCUGACAAGUAUGUCCGCA | 862 | 15519 | UGCGGACAUACUUGUCAGC | 2513 |
| 15519 | AAUCUACAACACAGGCUCU | 863 | 15519 | AAUCUACAACACAGGCUCU | 863 | 15537 | AGAGCCUGUGUUGUAGAUU | 2514 |
| 15537 | UAUGAGUGUCUCUAUAGAA | 864 | 15537 | UAUGAGUGUCUCUAUAGAA | 864 | 15555 | UUCUAUAGAGACACUCAUA | 2515 |
| 15555 | AAUAGGGAUGUUGAUCAUG | 865 | 15555 | AAUAGGGAUGUUGAUCAUG | 865 | 15573 | CAUGAUCAACAUCCCUAUU | 2516 |
| 15573 | GAAUUCGUGGAUGAGUUUU | 866 | 15573 | GAAUUCGUGGAUGAGUUUU | 866 | 15591 | AAAACUCAUCCACGAAUUC | 2517 |
| 15591 | UACGCUUACCUGCGUAAAC | 867 | 15591 | UACGCUUACCUGCGUAAAC | 867 | 15609 | GUUUACGCAGGUAAGCGUA | 2518 |
| 15609 | CAUUUCUCCAUGAUGAUUC | 868 | 15609 | CAUUUCUCCAUGAUGAUUC | 868 | 15627 | GAAUCAUCAUGGAGAAAUG | 2519 |
| 15627 | CUUUCUGAUGAUGCCGUUG | 869 | 15627 | CUUUCUGAUGAUGCCGUUG | 869 | 15645 | CAACGGCAUCAUCAGAAAG | 2520 |
| 15645 | GUGUGCUAUAACAGUAACU | 870 | 15645 | GUGUGCUAUAACAGUAACU | 870 | 15663 | AGUUACUGUUAUAGCACAC | 2521 |
| 15663 | UAUGCGGCUCAAGGUUUAG | 871 | 15663 | UAUGCGGCUCAAGGUUUAG | 871 | 15681 | CUAAACCUUGAGCCGCAUA | 2522 |
| 15681 | GUAGCUAGCAUUAAGAACU | 872 | 15681 | GUAGCUAGCAUUAAGAACU | 872 | 15699 | AGUUCUUAAUGCUAGCUAC | 2523 |
| 15699 | UUUAAGGCAGUUCUUUAUU | 873 | 15699 | UUUAAGGCAGUUCUUUAUU | 873 | 15717 | AAUAAAGAACUGCCUUAAA | 2524 |
| 15717 | UAUCAAAAUAAUGUGUUCA | 874 | 15717 | UAUCAAAAUAAUGUGUUCA | 874 | 15735 | UGAACACAUUAUUUUGAUA | 2525 |
| 15735 | AUGUCUGAGGCAAAAUGUU | 875 | 15735 | AUGUCUGAGGCAAAAUGUU | 875 | 15753 | AACAUUUUGCCUCAGACAU | 2526 |
| 15753 | UGGACUGAGACUGACCUUA | 876 | 15753 | UGGACUGAGACUGACCUUA | 876 | 15771 | UAAGGUCAGUCUCAGUCCA | 2527 |
| 15771 | ACUAAAGGACCUCACGAAU | 877 | 15771 | ACUAAAGGACCUCACGAAU | 877 | 15789 | AUUCGUGAGGUCCUUUAGU | 2528 |
| 15789 | UUUUGCUCACAGCAUACAA | 878 | 15789 | UUUUGCUCACAGCAUACAA | 878 | 15807 | UUGUAUGCUGUGAGCAAAA | 2529 |
| 15807 | AUGCUAGUUAAACAAGGAG | 879 | 15807 | AUGCUAGUUAAACAAGGAG | 879 | 15825 | CUCCUUGUUUAACUAGCAU | 2530 |
| 15825 | GAUGAUUACGUGUACCUGC | 880 | 15825 | GAUGAUUACGUGUACCUGC | 880 | 15843 | GCAGGUACACGUAAUCAUC | 2531 |
| 15843 | CCUUACCCAGAUCCAUCAA | 881 | 15843 | CCUUACCCAGAUCCAUCAA | 881 | 15861 | UUGAUGGAUCUGGGUAAGG | 2532 |
| 15861 | AGAAUAUUAGGCGCAGGCU | 882 | 15861 | AGAAUAUUAGGCGCAGGCU | 882 | 15879 | AGCCUGCGCCUAAUAUUCU | 2533 |
| 15879 | UGUUUUGUCGAUGAUAUUG | 883 | 15879 | UGUUUUGUCGAUGAUAUUG | 883 | 15897 | CAAUAUCAUCGACAAAACA | 2534 |
| 15897 | GUCAAAACAGAUGGUACAC | 884 | 15897 | GUCAAAACAGAUGGUACAC | 884 | 15915 | GUGUACCAUCUGUUUUGAC | 2535 |
| 15915 | CUUAUGAUUGAAAGGUUCG | 885 | 15915 | CUUAUGAUUGAAAGGUUCG | 885 | 15933 | CGAACCUUUCAAUCAUAAG | 2536 |
| 15933 | GUGUCACUGGCUAUUGAUG | 886 | 15933 | GUGUCACUGGCUAUUGAUG | 886 | 15951 | CAUCAAUAGCCAGUGACAC | 2537 |
| 15951 | GCUUACCCACUUACAAAAC | 887 | 15951 | GCUUACCCACUUACAAAAC | 887 | 15969 | GUUUUGUAAGUGGGUAAGC | 2538 |
| 15969 | CAUCCUAAUCAGGAGUAUG | 888 | 15969 | CAUCCUAAUCAGGAGUAUG | 888 | 15987 | CAUACUCCUGAUUAGGAUG | 2539 |
| 15987 | GCUGAUGUCUUUCACUUGU | 889 | 15987 | GCUGAUGUCUUUCACUUGU | 889 | 16005 | ACAAGUGAAAGACAUCAGC | 2540 |
| 16005 | UAUUUACAAUACAUUAGAA | 890 | 16005 | UAUUUACAAUACAUUAGAA | 890 | 16023 | UUCUAAUGUAUUGUAAAUA | 2541 |
| 16023 | AAGUUACAUGAUGAGCUUA | 891 | 16023 | AAGUUACAUGAUGAGCUUA | 891 | 16041 | UAAGCUCAUCAUGUAACUU | 2542 |
| 16041 | ACUGGCCACAUGUUGGACA | 892 | 16041 | ACUGGCCACAUGUUGGACA | 892 | 16059 | UGUCCAACAUGUGGCCAGU | 2543 |
| 16059 | AUGUAUUCCGUAAUGCUAA | 893 | 16059 | AUGUAUUCCGUAAUGCUAA | 893 | 16077 | UUAGCAUUACGGAAUACAU | 2544 |
| 16077 | ACUAAUGAUAACACCUCAC | 894 | 16077 | ACUAAUGAUAACACCUCAC | 894 | 16095 | GUGAGGUGUUAUCAUUAGU | 2545 |
| 16095 | CGGUACUGGGAACCUGAGU | 895 | 16095 | CGGUACUGGGAACCUGAGU | 895 | 16113 | ACUCAGGUUCCCAGUACCG | 2546 |
| 16113 | UUUUAUGAGGCUAUGUACA | 896 | 16113 | UUUUAUGAGGCUAUGUACA | 896 | 16131 | UGUACAUAGCCUCAUAAAA | 2547 |
| 16131 | ACACCACAUACAGUCUUGC | 897 | 16131 | ACACCACAUACAGUCUUGC | 897 | 16149 | GCAAGACUGUAUGUGGUGU | 2548 |
| 16149 | CAGGCUGUAGGUGCUUGUG | 898 | 16149 | CAGGCUGUAGGUGCUUGUG | 898 | 16167 | CACAAGCACCUACAGCCUG | 2549 |
| 16167 | GUAUUGUGCAAUUCACAGA | 899 | 16167 | GUAUUGUGCAAUUCACAGA | 899 | 16185 | UCUGUGAAUUGCACAAUAC | 2550 |
| 16185 | ACUUCACUUCGUUGCGGUG | 900 | 16185 | ACUUCACUUCGUUGCGGUG | 900 | 16203 | CACCGCAACGAAGUGAAGU | 2551 |
| 16203 | GCCUGUAUUAGGAGACCAU | 901 | 16203 | GCCUGUAUUAGGAGACCAU | 901 | 16221 | AUGGUCUCCUAAUACAGGC | 2552 |
| 16221 | UUCCUAUGUUGCAAGUGCU | 902 | 16221 | UUCCUAUGUUGCAAGUGCU | 902 | 16239 | AGCACUUGCAACAUAGGAA | 2553 |
| 16239 | UGCUAUGACCAUGUCAUUU | 903 | 16239 | UGCUAUGACCAUGUCAUUU | 903 | 16257 | AAAUGACAUGGUCAUAGCA | 2554 |
| 16257 | UCAACAUCACACAAAUUAG | 904 | 16257 | UCAACAUCACACAAAUUAG | 904 | 16275 | CUAAUUUGUGUGAUGUUGA | 2555 |
| 16275 | GUGUUGUCUGUUAAUCCCU | 905 | 16275 | GUGUUGUCUGUUAAUCCCU | 905 | 16293 | AGGGAUUAACAGACAACAC | 2556 |
| 16293 | UAUGUUUGCAAUGCCCCAG | 906 | 16293 | UAUGUUUGCAAUGCCCCAG | 906 | 16311 | CUGGGGCAUUGCAAACAUA | 2557 |
| 16311 | GGUUGUGAUGUCACUGAUG | 907 | 16311 | GGUUGUGAUGUCACUGAUG | 907 | 16329 | CAUCAGUGACAUCACAACC | 2558 |
| 16329 | GUGACACAACUGUAUCUAG | 908 | 16329 | GUGACACAACUGUAUCUAG | 908 | 16347 | CUAGAUACAGUUGUGUCAC | 2559 |
| 16347 | GGAGGUAUGAGCUAUUAUU | 909 | 16347 | GGAGGUAUGAGCUAUUAUU | 909 | 16365 | AAUAAUAGCUCAUACCUCC | 2560 |
| 16365 | UGCAAGUCACAUAAGCCUC | 910 | 16365 | UGCAAGUCACAUAAGCCUC | 910 | 16383 | GAGGCUUAUGUGACUUGCA | 2561 |
| 16383 | CCCAUUAGUUUUCCAUUAU | 911 | 16383 | CCCAUUAGUUUUCCAUUAU | 911 | 16401 | AUAAUGGAAAACUAAUGGG | 2562 |
| 16401 | UGUGCUAAUGGUCAGGUUU | 912 | 16401 | UGUGCUAAUGGUCAGGUUU | 912 | 16419 | AAACCUGACCAUUAGCACA | 2563 |
| 16419 | UUUGGUUUAUACAAAAACA | 913 | 16419 | UUUGGUUUAUACAAAAACA | 913 | 16437 | UGUUUUUGUAUAAACCAAA | 2564 |
| 16437 | ACAUGUGUAGGCAGUGACA | 914 | 16437 | ACAUGUGUAGGCAGUGACA | 914 | 16455 | UGUCACUGCCUACACAUGU | 2565 |
| 16455 | AAUGUCACUGACUUCAAUG | 915 | 16455 | AAUGUCACUGACUUCAAUG | 915 | 16473 | CAUUGAAGUCAGUGACAUU | 2566 |
| 16473 | GCGAUAGCAACAUGUGAUU | 916 | 16473 | GCGAUAGCAACAUGUGAUU | 916 | 16491 | AAUCACAUGUUGCUAUCGC | 2567 |
| 16491 | UGGACUAAUGCUGGCGAUU | 917 | 16491 | UGGACUAAUGCUGGCGAUU | 917 | 16509 | AAUCGCCAGCAUUAGUCCA | 2568 |
| 16509 | UACAUACUUGCCAACACUU | 918 | 16509 | UACAUACUUGCCAACACUU | 918 | 16527 | AAGUGUUGGCAAGUAUGUA | 2569 |
| 16527 | UGUACUGAGAGACUCAAGC | 919 | 16527 | UGUACUGAGAGACUCAAGC | 919 | 16545 | GCUUGAGUCUCUCAGUACA | 2570 |
| 16545 | CUUUUCGCAGCAGAAACGC | 920 | 16545 | CUUUUCGCAGCAGAAACGC | 920 | 16563 | GCGUUUCUGCUGCGAAAAG | 2571 |
| 16563 | CUCAAAGCCACUGAGGAAA | 921 | 16563 | CUCAAAGCCACUGAGGAAA | 921 | 16581 | UUUCCUCAGUGGCUUUGAG | 2572 |
| 16581 | ACAUUUAAGCUGUCAUAUG | 922 | 16581 | ACAUUUAAGCUGUCAUAUG | 922 | 16599 | CAUAUGACAGCUUAAAUGU | 2573 |
| 16599 | GGUAUUGCCACUGUACGCG | 923 | 16599 | GGUAUUGCCACUGUACGCG | 923 | 16617 | CGCGUACAGUGGCAAUACC | 2574 |
| 16617 | GAAGUACUCUCUGACAGAG | 924 | 16617 | GAAGUACUCUCUGACAGAG | 924 | 16635 | CUCUGUCAGAGAGUACUUC | 2575 |
| 16635 | GAAUUGCAUCUUUCAUGGG | 925 | 16635 | GAAUUGCAUCUUUCAUGGG | 925 | 16653 | CCCAUGAAAGAUGCAAUUC | 2576 |
| 16653 | GAGGUUGGAAAACCUAGAC | 926 | 16653 | GAGGUUGGAAAACCUAGAC | 926 | 16671 | GUCUAGGUUUUCCAACCUC | 2577 |
| 16671 | CCACCAUUGAACAGAAACU | 927 | 16671 | CCACCAUUGAACAGAAACU | 927 | 16689 | AGUUUCUGUUCAAUGGUGG | 2578 |
| 16689 | UAUGUCUUUACUGGUUACC | 928 | 16689 | UAUGUCUUUACUGGUUACC | 928 | 16707 | GGUAACCAGUAAAGACAUA | 2579 |
| 16707 | CGUGUAACUAAAAAUAGUA | 929 | 16707 | CGUGUAACUAAAAAUAGUA | 929 | 16725 | UACUAUUUUUAGUUACACG | 2580 |
| 16725 | AAAGUACAGAUUGGAGAGU | 930 | 16725 | AAAGUACAGAUUGGAGAGU | 930 | 16743 | ACUCUCCAAUCUGUACUUU | 2581 |
| 16743 | UACACCUUUGAAAAAGGUG | 931 | 16743 | UACACCUUUGAAAAAGGUG | 931 | 16761 | CACCUUUUUCAAAGGUGUA | 2582 |
| 16761 | GACUAUGGUGAUGCUGUUG | 932 | 16761 | GACUAUGGUGAUGCUGUUG | 932 | 16779 | CAACAGCAUCACCAUAGUC | 2583 |
| 16779 | GUGUACAGAGGUACUACGA | 933 | 16779 | GUGUACAGAGGUACUACGA | 933 | 16797 | UCGUAGUACCUCUGUACAC | 2584 |
| 16797 | ACAUACAAGUUGAAUGUUG | 934 | 16797 | ACAUACAAGUUGAAUGUUG | 934 | 16815 | CAACAUUCAACUUGUAUGU | 2585 |
| 16815 | GGUGAUUACUUUGUGUUGA | 935 | 16815 | GGUGAUUACUUUGUGUUGA | 935 | 16833 | UCAACACAAAGUAAUCACC | 2586 |
| 16833 | ACAUCUCACACUGUAAUGC | 936 | 16833 | ACAUCUCACACUGUAAUGC | 936 | 16851 | GCAUUACAGUGUGAGAUGU | 2587 |
| 16851 | CCACUUAGUGCACCUACUC | 937 | 16851 | CCACUUAGUGCACCUACUC | 937 | 16869 | GAGUAGGUGCACUAAGUGG | 2588 |
| 16869 | CUAGUGCCACAAGAGCACU | 938 | 16869 | CUAGUGCCACAAGAGCACU | 938 | 16887 | AGUGCUCUUGUGGCACUAG | 2589 |
| 16887 | UAUGUGAGAAUUACUGGCU | 939 | 16887 | UAUGUGAGAAUUACUGGCU | 939 | 16905 | AGCCAGUAAUUCUCACAUA | 2590 |
| 16905 | UUGUACCCAACACUCAACA | 940 | 16905 | UUGUACCCAACACUCAACA | 940 | 16923 | UGUUGAGUGUUGGGUACAA | 2591 |
| 16923 | AUCUCAGAUGAGUUUUCUA | 941 | 16923 | AUCUCAGAUGAGUUUUCUA | 941 | 16941 | UAGAAAACUCAUCUGAGAU | 2592 |
| 16941 | AGCAAUGUUGCAAAUUAUC | 942 | 16941 | AGCAAUGUUGCAAAUUAUC | 942 | 16959 | GAUAAUUUGCAACAUUGCU | 2593 |
| 16959 | CAAAAGGUCGGCAUGCAAA | 943 | 16959 | CAAAAGGUCGGCAUGCAAA | 943 | 16977 | UUUGCAUGCCGACCUUUUG | 2594 |
| 16977 | AAGUACUCUACACUCCAAG | 944 | 16977 | AAGUACUCUACACUCCAAG | 944 | 16995 | CUUGGAGUGUAGAGUACUU | 2595 |
| 16995 | GGACCACCUGGUACUGGUA | 945 | 16995 | GGACCACCUGGUACUGGUA | 945 | 17013 | UACCAGUACCAGGUGGUCC | 2596 |
| 17013 | AAGAGUCAUUUUGCCAUCG | 946 | 17013 | AAGAGUCAUUUUGCCAUCG | 946 | 17031 | CGAUGGCAAAAUGACUCUU | 2597 |
| 17031 | GGACUUGCUCUCUAUUACC | 947 | 17031 | GGACUUGCUCUCUAUUACC | 947 | 17049 | GGUAAUAGAGAGCAAGUCC | 2598 |
| 17049 | CCAUCUGCUCGCAUAGUGU | 948 | 17049 | CCAUCUGCUCGCAUAGUGU | 948 | 17067 | ACACUAUGCGAGCAGAUGG | 2599 |
| 17067 | UAUACGGCAUGCUCUCAUG | 949 | 17067 | UAUACGGCAUGCUCUCAUG | 949 | 17085 | CAUGAGAGCAUGCCGUAUA | 2600 |
| 17085 | GCAGCUGUUGAUGCCCUAU | 950 | 17085 | GCAGCUGUUGAUGCCCUAU | 950 | 17103 | AUAGGGCAUCAACAGCUGC | 2601 |
| 17103 | UGUGAAAAGGCAUUAAAAU | 951 | 17103 | UGUGAAAAGGCAUUAAAAU | 951 | 17121 | AUUUUAAUGCCUUUUCACA | 2602 |
| 17121 | UAUUUGCCCAUAGAUAAAU | 952 | 17121 | UAUUUGCCCAUAGAUAAAU | 952 | 17139 | AUUUAUCUAUGGGCAAAUA | 2603 |
| 17139 | UGUAGUAGAAUCAUACCUG | 953 | 17139 | UGUAGUAGAAUCAUACCUG | 953 | 17157 | CAGGUAUGAUUCUACUACA | 2604 |
| 17157 | GCGCGUGCGCGCGUAGAGU | 954 | 17157 | GCGCGUGCGCGCGUAGAGU | 954 | 17175 | ACUCUACGCGCGCACGCGC | 2605 |
| 17175 | UGUUUUGAUAAAUUCAAAG | 955 | 17175 | UGUUUUGAUAAAUUCAAAG | 955 | 17193 | CUUUGAAUUUAUCAAAACA | 2606 |
| 17193 | GUGAAUUCAACACUAGAAC | 956 | 17193 | GUGAAUUCAACACUAGAAC | 956 | 17211 | GUUCUAGUGUUGAAUUCAC | 2607 |
| 17211 | CAGUAUGUUUUCUGCACUG | 957 | 17211 | CAGUAUGUUUUCUGCACUG | 957 | 17229 | CAGUGCAGAAAACAUACUG | 2608 |
| 17229 | GUAAAUGCAUUGCCAGAAA | 958 | 17229 | GUAAAUGCAUUGCCAGAAA | 958 | 17247 | UUUCUGGCAAUGCAUUUAC | 2609 |
| 17247 | ACAACUGCUGACAUUGUAG | 959 | 17247 | ACAACUGCUGACAUUGUAG | 959 | 17265 | CUACAAUGUCAGCAGUUGU | 2610 |
| 17265 | GUCUUUGAUGAAAUCUCUA | 960 | 17265 | GUCUUUGAUGAAAUCUCUA | 960 | 17283 | UAGAGAUUUCAUCAAAGAC | 2611 |
| 17283 | AUGGCUACUAAUUAUGACU | 961 | 17283 | AUGGCUACUAAUUAUGACU | 961 | 17301 | AGUCAUAAUUAGUAGCCAU | 2612 |
| 17301 | UUGAGUGUUGUCAAUGCUA | 962 | 17301 | UUGAGUGUUGUCAAUGCUA | 962 | 17319 | UAGCAUUGACAACACUCAA | 2613 |
| 17319 | AGACUUCGUGCAAAACACU | 963 | 17319 | AGACUUCGUGCAAAACACU | 963 | 17337 | AGUGUUUUGCACGAAGUCU | 2614 |
| 17337 | UACGUCUAUAUUGGCGAUC | 964 | 17337 | UACGUCUAUAUUGGCGAUC | 964 | 17355 | GAUCGCCAAUAUAGACGUA | 2615 |
| 17355 | CCUGCUCAAUUACCAGCCC | 965 | 17355 | CCUGCUCAAUUACCAGCCC | 965 | 17373 | GGGCUGGUAAUUGAGCAGG | 2616 |
| 17373 | CCCCGCACAUUGCUGACUA | 966 | 17373 | CCCCGCACAUUGCUGACUA | 966 | 17391 | UAGUCAGCAAUGUGCGGGG | 2617 |
| 17391 | AAAGGCACACUAGAACCAG | 967 | 17391 | AAAGGCACACUAGAACCAG | 967 | 17409 | CUGGUUCUAGUGUGCCUUU | 2618 |
| 17409 | GAAUAUUUUAAUUCAGUGU | 968 | 17409 | GAAUAUUUUAAUUCAGUGU | 968 | 17427 | ACACUGAAUUAAAAUAUUC | 2619 |
| 17427 | UGCAGACUUAUGAAAACAA | 969 | 17427 | UGCAGACUUAUGAAAACAA | 969 | 17445 | UUGUUUUCAUAAGUCUGCA | 2620 |
| 17445 | AUAGGUCCAGACAUGUUCC | 970 | 17445 | AUAGGUCCAGACAUGUUCC | 970 | 17463 | GGAACAUGUCUGGACCUAU | 2621 |
| 17463 | CUUGGAACUUGUCGCCGUU | 971 | 17463 | CUUGGAACUUGUCGCCGUU | 971 | 17481 | AACGGCGACAAGUUCCAAG | 2622 |
| 17481 | UGUCCUGCUGAAAUUGUUG | 972 | 17481 | UGUCCUGCUGAAAUUGUUG | 972 | 17499 | CAACAAUUUCAGCAGGACA | 2623 |
| 17499 | GACACUGUGAGUGCUUUAG | 973 | 17499 | GACACUGUGAGUGCUUUAG | 973 | 17517 | CUAAAGCACUCACAGUGUC | 2624 |
| 17517 | GUUUAUGACAAUAAGCUAA | 974 | 17517 | GUUUAUGACAAUAAGCUAA | 974 | 17535 | UUAGCUUAUUGUCAUAAAC | 2625 |
| 17535 | AAAGCACACAAGGAUAAGU | 975 | 17535 | AAAGCACACAAGGAUAAGU | 975 | 17553 | ACUUAUCCUUGUGUGCUUU | 2626 |
| 17553 | UCAGCUCAAUGCUUCAAAA | 976 | 17553 | UCAGCUCAAUGCUUCAAAA | 976 | 17571 | UUUUGAAGCAUUGAGCUGA | 2627 |
| 17571 | AUGUUCUACAAAGGUGUUA | 977 | 17571 | AUGUUCUACAAAGGUGUUA | 977 | 17589 | UAACACCUUUGUAGAACAU | 2628 |
| 17589 | AUUACACAUGAUGUUUCAU | 978 | 17589 | AUUACACAUGAUGUUUCAU | 978 | 17607 | AUGAAACAUCAUGUGUAAU | 2629 |
| 17607 | UCUGCAAUCAACAGACCUC | 979 | 17607 | UCUGCAAUCAACAGACCUC | 979 | 17625 | GAGGUCUGUUGAUUGCAGA | 2630 |
| 17625 | CAAAUAGGCGUUGUAAGAG | 980 | 17625 | CAAAUAGGCGUUGUAAGAG | 980 | 17643 | CUCUUACAACGCCUAUUUG | 2631 |
| 17643 | GAAUUUCUUACACGCAAUC | 981 | 17643 | GAAUUUCUUACACGCAAUC | 981 | 17661 | GAUUGCGUGUAAGAAAUUC | 2632 |
| 17661 | CCUGCUUGGAGAAAAGCUG | 982 | 17661 | CCUGCUUGGAGAAAAGCUG | 982 | 17679 | CAGCUUUUCUCCAAGCAGG | 2633 |
| 17679 | GUUUUUAUCUCACCUUAUA | 983 | 17679 | GUUUUUAUCUCACCUUAUA | 983 | 17697 | UAUAAGGUGAGAUAAAAAC | 2634 |
| 17697 | AAUUCACAGAACGCUGUAG | 984 | 17697 | AAUUCACAGAACGCUGUAG | 984 | 17715 | CUACAGCGUUCUGUGAAUU | 2635 |
| 17715 | GCUUCAAAAAUCUUAGGAU | 985 | 17715 | GCUUCAAAAAUCUUAGGAU | 985 | 17733 | AUCCUAAGAUUUUUGAAGC | 2636 |
| 17733 | UUGCCUACGCAGACUGUUG | 986 | 17733 | UUGCCUACGCAGACUGUUG | 986 | 17751 | CAACAGUCUGCGUAGGCAA | 2637 |
| 17751 | GAUUCAUCACAGGGUUCUG | 987 | 17751 | GAUUCAUCACAGGGUUCUG | 987 | 17769 | CAGAACCCUGUGAUGAAUC | 2638 |
| 17769 | GAAUAUGACUAUGUCAUAU | 988 | 17769 | GAAUAUGACUAUGUCAUAU | 988 | 17787 | AUAUGACAUAGUCAUAUUC | 2639 |
| 17787 | UUCACACAAACUACUGAAA | 989 | 17787 | UUCACACAAACUACUGAAA | 989 | 17805 | UUUCAGUAGUUUGUGUGAA | 2640 |
| 17805 | ACAGCACACUCUUGUAAUG | 990 | 17805 | ACAGCACACUCUUGUAAUG | 990 | 17823 | CAUUACAAGAGUGUGCUGU | 2641 |
| 17823 | GUCAACCGCUUCAAUGUGG | 991 | 17823 | GUCAACCGCUUCAAUGUGG | 991 | 17841 | CCACAUUGAAGCGGUUGAC | 2642 |
| 17841 | GCUAUCACAAGGGCAAAAA | 992 | 17841 | GCUAUCACAAGGGCAAAAA | 992 | 17859 | UUUUUGCCCUUGUGAUAGC | 2643 |
| 17859 | AUUGGCAUUUUGUGCAUAA | 993 | 17859 | AUUGGCAUUUUGUGCAUAA | 993 | 17877 | UUAUGCACAAAAUGCCAAU | 2644 |
| 17877 | AUGUCUGAUAGAGAUCUUU | 994 | 17877 | AUGUCUGAUAGAGAUCUUU | 994 | 17895 | AAAGAUCUCUAUCAGACAU | 2645 |
| 17895 | UAUGACAAACUGCAAUUUA | 995 | 17895 | UAUGACAAACUGCAAUUUA | 995 | 17913 | UAAAUUGCAGUUUGUCAUA | 2646 |
| 17913 | ACAAGUCUAGAAAUACCAC | 996 | 17913 | ACAAGUCUAGAAAUACCAC | 996 | 17931 | GUGGUAUUUCUAGACUUGU | 2647 |
| 17931 | CGUCGCAAUGUGGCUACAU | 997 | 17931 | CGUCGCAAUGUGGCUACAU | 997 | 17949 | AUGUAGCCACAUUGCGACG | 2648 |
| 17949 | UUACAAGCAGAAAAUGUAA | 998 | 17949 | UUACAAGCAGAAAAUGUAA | 998 | 17967 | UUACAUUUUCUGCUUGUAA | 2649 |
| 17967 | ACUGGACUUUUUAAGGACU | 999 | 17967 | ACUGGACUUUUUAAGGACU | 999 | 17985 | AGUCCUUAAAAAGUCCAGU | 2650 |
| 17985 | UGUAGUAAGAUCAUUACUG | 1000 | 17985 | UGUAGUAAGAUCAUUACUG | 1000 | 18003 | CAGUAAUGAUCUUACUACA | 2651 |
| 18003 | GGUCUUCAUCCUACACAGG | 1001 | 18003 | GGUCUUCAUCCUACACAGG | 1001 | 18021 | CCUGUGUAGGAUGAAGACC | 2652 |
| 18021 | GCACCUACACACCUCAGCG | 1002 | 18021 | GCACCUACACACCUCAGCG | 1002 | 18039 | CGCUGAGGUGUGUAGGUGC | 2653 |
| 18039 | GUUGAUAUAAAGUUCAAGA | 1003 | 18039 | GUUGAUAUAAAGUUCAAGA | 1003 | 18057 | UCUUGAACUUUAUAUCAAC | 2654 |
| 18057 | ACUGAAGGAUUAUGUGUUG | 1004 | 18057 | ACUGAAGGAUUAUGUGUUG | 1004 | 18075 | CAACACAUAAUCCUUCAGU | 2655 |
| 18075 | GACAUACCAGGCAUACCAA | 1005 | 18075 | GACAUACCAGGCAUACCAA | 1005 | 18093 | UUGGUAUGCCUGGUAUGUC | 2656 |
| 18093 | AAGGACAUGACCUACCGUA | 1006 | 18093 | AAGGACAUGACCUACCGUA | 1006 | 18111 | UACGGUAGGUCAUGUCCUU | 2657 |
| 18111 | AGACUCAUCUCUAUGAUGG | 1007 | 18111 | AGACUCAUCUCUAUGAUGG | 1007 | 18129 | CCAUCAUAGAGAUGAGUCU | 2658 |
| 18129 | GGUUUCAAAAUGAAUUACC | 1008 | 18129 | GGUUUCAAAAUGAAUUACC | 1008 | 18147 | GGUAAUUCAUUUUGAAACC | 2659 |
| 18147 | CAAGUCAAUGGUUACCCUA | 1009 | 18147 | CAAGUCAAUGGUUACCCUA | 1009 | 18165 | UAGGGUAACCAUUGACUUG | 2660 |
| 18165 | AAUAUGUUUAUCACCCGCG | 1010 | 18165 | AAUAUGUUUAUCACCCGCG | 1010 | 18183 | CGCGGGUGAUAAACAUAUU | 2661 |
| 18183 | GAAGAAGCUAUUCGUCACG | 1011 | 18183 | GAAGAAGCUAUUCGUCACG | 1011 | 18201 | CGUGACGAAUAGCUUCUUC | 2662 |
| 18201 | GUUCGUGCGUGGAUUGGCU | 1012 | 18201 | GUUCGUGCGUGGAUUGGCU | 1012 | 18219 | AGCCAAUCCACGCACGAAC | 2663 |
| 18219 | UUUGAUGUAGAGGGCUGUC | 1013 | 18219 | UUUGAUGUAGAGGGCUGUC | 1013 | 18237 | GACAGCCCUCUACAUCAAA | 2664 |
| 18237 | CAUGCAACUAGAGAUGCUG | 1014 | 18237 | CAUGCAACUAGAGAUGCUG | 1014 | 18255 | CAGCAUCUCUAGUUGCAUG | 2665 |
| 18255 | GUGGGUACUAACCUACCUC | 1015 | 18255 | GUGGGUACUAACCUACCUC | 1015 | 18273 | GAGGUAGGUUAGUACCCAC | 2666 |
| 18273 | CUCCAGCUAGGAUUUUCUA | 1016 | 18273 | CUCCAGCUAGGAUUUUCUA | 1016 | 18291 | UAGAAAAUCCUAGCUGGAG | 2667 |
| 18291 | ACAGGUGUUAACUUAGUAG | 1017 | 18291 | ACAGGUGUUAACUUAGUAG | 1017 | 18309 | CUACUAAGUUAACACCUGU | 2668 |
| 18309 | GCUGUACCGACUGGUUAUG | 1018 | 18309 | GCUGUACCGACUGGUUAUG | 1018 | 18327 | CAUAACCAGUCGGUACAGC | 2669 |
| 18327 | GUUGACACUGAAAAUAACA | 1019 | 18327 | GUUGACACUGAAAAUAACA | 1019 | 18345 | UGUUAUUUUCAGUGUCAAC | 2670 |
| 18345 | ACAGAAUUCACCAGAGUUA | 1020 | 18345 | ACAGAAUUCACCAGAGUUA | 1020 | 18363 | UAACUCUGGUGAAUUCUGU | 2671 |
| 18363 | AAUGCAAAACCUCCACCAG | 1021 | 18363 | AAUGCAAAACCUCCACCAG | 1021 | 18381 | CUGGUGGAGGUUUUGCAUU | 2672 |
| 18381 | GGUGACCAGUUUAAACAUC | 1022 | 18381 | GGUGACCAGUUUAAACAUC | 1022 | 18399 | GAUGUUUAAACUGGUCACC | 2673 |
| 18399 | CUUAUACCACUCAUGUAUA | 1023 | 18399 | CUUAUACCACUCAUGUAUA | 1023 | 18417 | UAUACAUGAGUGGUAUAAG | 2674 |
| 18417 | AAAGGCUUGCCCUGGAAUG | 1024 | 18417 | AAAGGCUUGCCCUGGAAUG | 1024 | 18435 | CAUUCCAGGGCAAGCCUUU | 2675 |
| 18435 | GUAGUGCGUAUUAAGAUAG | 1025 | 18435 | GUAGUGCGUAUUAAGAUAG | 1025 | 18453 | CUAUCUUAAUACGCACUAC | 2676 |
| 18453 | GUACAAAUGCUCAGUGAUA | 1026 | 18453 | GUACAAAUGCUCAGUGAUA | 1026 | 18471 | UAUCACUGAGCAUUUGUAC | 2677 |
| 18471 | ACACUGAAAGGAUUGUCAG | 1027 | 18471 | ACACUGAAAGGAUUGUCAG | 1027 | 18489 | CUGACAAUCCUUUCAGUGU | 2678 |
| 18489 | GACAGAGUCGUGUUCGUCC | 1028 | 18489 | GACAGAGUCGUGUUCGUCC | 1028 | 18507 | GGACGAACACGACUCUGUC | 2679 |
| 18507 | CUUUGGGCGCAUGGCUUUG | 1029 | 18507 | CUUUGGGCGCAUGGCUUUG | 1029 | 18525 | CAAAGCCAUGCGCCCAAAG | 2680 |
| 18525 | GAGCUUACAUCAAUGAAGU | 1030 | 18525 | GAGCUUACAUCAAUGAAGU | 1030 | 18543 | ACUUCAUUGAUGUAAGCUC | 2681 |
| 18543 | UACUUUGUCAAGAUUGGAC | 1031 | 18543 | UACUUUGUCAAGAUUGGAC | 1031 | 18561 | GUCCAAUCUUGACAAAGUA | 2682 |
| 18561 | CCUGAAAGAACGUGUUGUC | 1032 | 18561 | CCUGAAAGAACGUGUUGUC | 1032 | 18579 | GACAACACGUUCUUUCAGG | 2683 |
| 18579 | CUGUGUGACAAACGUGCAA | 1033 | 18579 | CUGUGUGACAAACGUGCAA | 1033 | 18597 | UUGCACGUUUGUCACACAG | 2684 |
| 18597 | ACUUGCUUUUCUACUUCAU | 1034 | 18597 | ACUUGCUUUUCUACUUCAU | 1034 | 18615 | AUGAAGUAGAAAAGCAAGU | 2685 |
| 18615 | UCAGAUACUUAUGCCUGCU | 1035 | 18615 | UCAGAUACUUAUGCCUGCU | 1035 | 18633 | AGCAGGCAUAAGUAUCUGA | 2686 |
| 18633 | UGGAAUCAUUCUGUGGGUU | 1036 | 18633 | UGGAAUCAUUCUGUGGGUU | 1036 | 18651 | AACCCACAGAAUGAUUCCA | 2687 |
| 18651 | UUUGACUAUGUCUAUAACC | 1037 | 18651 | UUUGACUAUGUCUAUAACC | 1037 | 18669 | GGUUAUAGACAUAGUCAAA | 2688 |
| 18669 | CCAUUUAUGAUUGAUGUUC | 1038 | 18669 | CCAUUUAUGAUUGAUGUUC | 1038 | 18687 | GAACAUCAAUCAUAAAUGG | 2689 |
| 18687 | CAGCAGUGGGGCUUUACGG | 1039 | 18687 | CAGCAGUGGGGCUUUACGG | 1039 | 18705 | CCGUAAAGCCCCACUGCUG | 2690 |
| 18705 | GGUAACCUUCAGAGUAACC | 1040 | 18705 | GGUAACCUUCAGAGUAACC | 1040 | 18723 | GGUUACUCUGAAGGUUACC | 2691 |
| 18723 | CAUGACCAACAUUGCCAGG | 1041 | 18723 | CAUGACCAACAUUGCCAGG | 1041 | 18741 | CCUGGCAAUGUUGGUCAUG | 2692 |
| 18741 | GUACAUGGAAAUGCACAUG | 1042 | 18741 | GUACAUGGAAAUGCACAUG | 1042 | 18759 | CAUGUGCAUUUCCAUGUAC | 2693 |
| 18759 | GUGGCUAGUUGUGAUGCUA | 1043 | 18759 | GUGGCUAGUUGUGAUGCUA | 1043 | 18777 | UAGCAUCACAACUAGCCAC | 2694 |
| 18777 | AUCAUGACUAGAUGUUUAG | 1044 | 18777 | AUCAUGACUAGAUGUUUAG | 1044 | 18795 | CUAAACAUCUAGUCAUGAU | 2695 |
| 18795 | GCAGUCCAUGAGUGCUUUG | 1045 | 18795 | GCAGUCCAUGAGUGCUUUG | 1045 | 18813 | CAAAGCACUCAUGGACUGC | 2696 |
| 18813 | GUUAAGCGCGUUGAUUGGU | 1046 | 18813 | GUUAAGCGCGUUGAUUGGU | 1046 | 18831 | ACCAAUCAACGCGCUUAAC | 2697 |
| 18831 | UCUGUUGAAUACCCUAUUA | 1047 | 18831 | UCUGUUGAAUACCCUAUUA | 1047 | 18849 | UAAUAGGGUAUUCAACAGA | 2698 |
| 18849 | AUAGGAGAUGAACUGAGGG | 1048 | 18849 | AUAGGAGAUGAACUGAGGG | 1048 | 18867 | CCCUCAGUUCAUCUCCUAU | 2699 |
| 18867 | GUUAAUUCUGCUUGCAGAA | 1049 | 18867 | GUUAAUUCUGCUUGCAGAA | 1049 | 18885 | UUCUGCAAGCAGAAUUAAC | 2700 |
| 18885 | AAAGUACAACACAUGGUUG | 1050 | 18885 | AAAGUACAACACAUGGUUG | 1050 | 18903 | CAACCAUGUGUUGUACUUU | 2701 |
| 18903 | GUGAAGUCUGCAUUGCUUG | 1051 | 18903 | GUGAAGUCUGCAUUGCUUG | 1051 | 18921 | CAAGCAAUGCAGACUUCAC | 2702 |
| 18921 | GCUGAUAAGUUUCCAGUUC | 1052 | 18921 | GCUGAUAAGUUUCCAGUUC | 1052 | 18939 | GAACUGGAAACUUAUCAGC | 2703 |
| 18939 | CUUCAUGACAUUGGAAAUC | 1053 | 18939 | CUUCAUGACAUUGGAAAUC | 1053 | 18957 | GAUUUCCAAUGUCAUGAAG | 2704 |
| 18957 | CCAAAGGCUAUCAAGUGUG | 1054 | 18957 | CCAAAGGCUAUCAAGUGUG | 1054 | 18975 | CACACUUGAUAGCCUUUGG | 2705 |
| 18975 | GUGCCUCAGGCUGAAGUAG | 1055 | 18975 | GUGCCUCAGGCUGAAGUAG | 1055 | 18993 | CUACUUCAGCCUGAGGCAC | 2706 |
| 18993 | GAAUGGAAGUUCUACGAUG | 1056 | 18993 | GAAUGGAAGUUCUACGAUG | 1056 | 19011 | CAUCGUAGAACUUCCAUUC | 2707 |
| 19011 | GCUCAGCCAUGUAGUGACA | 1057 | 19011 | GCUCAGCCAUGUAGUGACA | 1057 | 19029 | UGUCACUACAUGGCUGAGC | 2708 |
| 19029 | AAAGCUUACAAAAUAGAGG | 1058 | 19029 | AAAGCUUACAAAAUAGAGG | 1058 | 19047 | CCUCUAUUUUGUAAGCUUU | 2709 |
| 19047 | GAACUCUUCUAUUCUUAUG | 1059 | 19047 | GAACUCUUCUAUUCUUAUG | 1059 | 19065 | CAUAAGAAUAGAAGAGUUC | 2710 |
| 19065 | GCUACACAUCACGAUAAAU | 1060 | 19065 | GCUACACAUCACGAUAAAU | 1060 | 19083 | AUUUAUCGUGAUGUGUAGC | 2711 |
| 19083 | UUCACUGAUGGUGUUUGUU | 1061 | 19083 | UUCACUGAUGGUGUUUGUU | 1061 | 19101 | AACAAACACCAUCAGUGAA | 2712 |
| 19101 | UUGUUUUGGAAUUGUAACG | 1062 | 19101 | UUGUUUUGGAAUUGUAACG | 1062 | 19119 | CGUUACAAUUCCAAAACAA | 2713 |
| 19119 | GUUGAUCGUUACCCAGCCA | 1063 | 19119 | GUUGAUCGUUACCCAGCCA | 1063 | 19137 | UGGCUGGGUAACGAUCAAC | 2714 |
| 19137 | AAUGCAAUUGUGUGUAGGU | 1064 | 19137 | AAUGCAAUUGUGUGUAGGU | 1064 | 19155 | ACCUACACACAAUUGCAUU | 2715 |
| 19155 | UUUGACACAAGAGUCUUGU | 1065 | 19155 | UUUGACACAAGAGUCUUGU | 1065 | 19173 | ACAAGACUCUUGUGUCAAA | 2716 |
| 19173 | UCAAACUUGAACUUACCAG | 1066 | 19173 | UCAAACUUGAACUUACCAG | 1066 | 19191 | CUGGUAAGUUCAAGUUUGA | 2717 |
| 19191 | GGCUGUGAUGGUGGUAGUU | 1067 | 19191 | GGCUGUGAUGGUGGUAGUU | 1067 | 19209 | AACUACCACCAUCACAGCC | 2718 |
| 19209 | UUGUAUGUGAAUAAGCAUG | 1068 | 19209 | UUGUAUGUGAAUAAGCAUG | 1068 | 19227 | CAUGCUUAUUCACAUACAA | 2719 |
| 19227 | GCAUUCCACACUCCAGCUU | 1069 | 19227 | GCAUUCCACACUCCAGCUU | 1069 | 19245 | AAGCUGGAGUGUGGAAUGC | 2720 |
| 19245 | UUCGAUAAAAGUGCAUUUA | 1070 | 19245 | UUCGAUAAAAGUGCAUUUA | 1070 | 19263 | UAAAUGCACUUUUAUCGAA | 2721 |
| 19263 | ACUAAUUUAAAGCAAUUGC | 1071 | 19263 | ACUAAUUUAAAGCAAUUGC | 1071 | 19281 | GCAAUUGCUUUAAAUUAGU | 2722 |
| 19281 | CCUUUCUUUUACUAUUCUG | 1072 | 19281 | CCUUUCUUUUACUAUUCUG | 1072 | 19299 | CAGAAUAGUAAAAGAAAGG | 2723 |
| 19299 | GAUAGUCCUUGUGAGUCUC | 1073 | 19299 | GAUAGUCCUUGUGAGUCUC | 1073 | 19317 | GAGACUCACAAGGACUAUC | 2724 |
| 19317 | CAUGGCAAACAAGUAGUGU | 1074 | 19317 | CAUGGCAAACAAGUAGUGU | 1074 | 19335 | ACACUACUUGUUUGCCAUG | 2725 |
| 19335 | UCGGAUAUUGAUUAUGUUC | 1075 | 19335 | UCGGAUAUUGAUUAUGUUC | 1075 | 19353 | GAACAUAAUCAAUAUCCGA | 2726 |
| 19353 | CCACUCAAAUCUGCUACGU | 1076 | 19353 | CCACUCAAAUCUGCUACGU | 1076 | 19371 | ACGUAGCAGAUUUGAGUGG | 2727 |
| 19371 | UGUAUUACACGAUGCAAUU | 1077 | 19371 | UGUAUUACACGAUGCAAUU | 1077 | 19389 | AAUUGCAUCGUGUAAUACA | 2728 |
| 19389 | UUAGGUGGUGCUGUUUGCA | 1078 | 19389 | UUAGGUGGUGCUGUUUGCA | 1078 | 19407 | UGCAAACAGCACCACCUAA | 2729 |
| 19407 | AGACACCAUGCAAAUGAGU | 1079 | 19407 | AGACACCAUGCAAAUGAGU | 1079 | 19425 | ACUCAUUUGCAUGGUGUCU | 2730 |
| 19425 | UACCGACAGUACUUGGAUG | 1080 | 19425 | UACCGACAGUACUUGGAUG | 1080 | 19443 | CAUCCAAGUACUGUCGGUA | 2731 |
| 19443 | GCAUAUAAUAUGAUGAUUU | 1081 | 19443 | GCAUAUAAUAUGAUGAUUU | 1081 | 19461 | AAAUCAUCAUAUUAUAUGC | 2732 |
| 19461 | UCUGCUGGAUUUAGCCUAU | 1082 | 19461 | UCUGCUGGAUUUAGCCUAU | 1082 | 19479 | AUAGGCUAAAUCCAGCAGA | 2733 |
| 19479 | UGGAUUUACAAACAAUUUG | 1083 | 19479 | UGGAUUUACAAACAAUUUG | 1083 | 19497 | CAAAUUGUUUGUAAAUCCA | 2734 |
| 19497 | GAUACUUAUAACCUGUGGA | 1084 | 19497 | GAUACUUAUAACCUGUGGA | 1084 | 19515 | UCCACAGGUUAUAAGUAUC | 2735 |
| 19515 | AAUACAUUUACCAGGUUAC | 1085 | 19515 | AAUACAUUUACCAGGUUAC | 1085 | 19533 | GUAACCUGGUAAAUGUAUU | 2736 |
| 19533 | CAGAGUUUAGAAAAUGUGG | 1086 | 19533 | CAGAGUUUAGAAAAUGUGG | 1086 | 19551 | CCACAUUUUCUAAACUCUG | 2737 |
| 19551 | GCUUAUAAUGUUGUUAAUA | 1087 | 19551 | GCUUAUAAUGUUGUUAAUA | 1087 | 19569 | UAUUAACAACAUUAUAAGC | 2738 |
| 19569 | AAAGGACACUUUGAUGGAC | 1088 | 19569 | AAAGGACACUUUGAUGGAC | 1088 | 19587 | GUCCAUCAAAGUGUCCUUU | 2739 |
| 19587 | CACGCCGGCGAAGCACCUG | 1089 | 19587 | CACGCCGGCGAAGCACCUG | 1089 | 19605 | CAGGUGCUUCGCCGGCGUG | 2740 |
| 19605 | GUUUCCAUCAUUAAUAAUG | 1090 | 19605 | GUUUCCAUCAUUAAUAAUG | 1090 | 19623 | CAUUAUUAAUGAUGGAAAC | 2741 |
| 19623 | GCUGUUUACACAAAGGUAG | 1091 | 19623 | GCUGUUUACACAAAGGUAG | 1091 | 19641 | CUACCUUUGUGUAAACAGC | 2742 |
| 19641 | GAUGGUAUUGAUGUGGAGA | 1092 | 19641 | GAUGGUAUUGAUGUGGAGA | 1092 | 19659 | UCUCCACAUCAAUACCAUC | 2743 |
| 19659 | AUCUUUGAAAAUAAGACAA | 1093 | 19659 | AUCUUUGAAAAUAAGACAA | 1093 | 19677 | UUGUCUUAUUUUCAAAGAU | 2744 |
| 19677 | ACACUUCCUGUUAAUGUUG | 1094 | 19677 | ACACUUCCUGUUAAUGUUG | 1094 | 19695 | CAACAUUAACAGGAAGUGU | 2745 |
| 19695 | GCAUUUGAGCUUUGGGCUA | 1095 | 19695 | GCAUUUGAGCUUUGGGCUA | 1095 | 19713 | UAGCCCAAAGCUCAAAUGC | 2746 |
| 19713 | AAGCGUAACAUUAAACCAG | 1096 | 19713 | AAGCGUAACAUUAAACCAG | 1096 | 19731 | CUGGUUUAAUGUUACGCUU | 2747 |
| 19731 | GUGCCAGAGAUUAAGAUAC | 1097 | 19731 | GUGCCAGAGAUUAAGAUAC | 1097 | 19749 | GUAUCUUAAUCUCUGGCAC | 2748 |
| 19749 | CUCAAUAAUUUGGGUGUUG | 1098 | 19749 | CUCAAUAAUUUGGGUGUUG | 1098 | 19767 | CAACACCCAAAUUAUUGAG | 2749 |
| 19767 | GAUAUCGCUGCUAAUACUG | 1099 | 19767 | GAUAUCGCUGCUAAUACUG | 1099 | 19785 | CAGUAUUAGCAGCGAUAUC | 2750 |
| 19785 | GUAAUCUGGGACUACAAAA | 1100 | 19785 | GUAAUCUGGGACUACAAAA | 1100 | 19803 | UUUUGUAGUCCCAGAUUAC | 2751 |
| 19803 | AGAGAAGCCCCAGCACAUG | 1101 | 19803 | AGAGAAGCCCCAGCACAUG | 1101 | 19821 | CAUGUGCUGGGGCUUCUCU | 2752 |
| 19821 | GUAUCUACAAUAGGUGUCU | 1102 | 19821 | GUAUCUACAAUAGGUGUCU | 1102 | 19839 | AGACACCUAUUGUAGAUAC | 2753 |
| 19839 | UGCACAAUGACUGACAUUG | 1103 | 19839 | UGCACAAUGACUGACAUUG | 1103 | 19857 | CAAUGUCAGUCAUUGUGCA | 2754 |
| 19857 | GCCAAGAAACCUACUGAGA | 1104 | 19857 | GCCAAGAAACCUACUGAGA | 1104 | 19875 | UCUCAGUAGGUUUCUUGGC | 2755 |
| 19875 | AGUGCUUGUUCUUCACUUA | 1105 | 19875 | AGUGCUUGUUCUUCACUUA | 1105 | 19893 | UAAGUGAAGAACAAGCACU | 2756 |
| 19893 | ACUGUCUUGUUUGAUGGUA | 1106 | 19893 | ACUGUCUUGUUUGAUGGUA | 1106 | 19911 | UACCAUCAAACAAGACAGU | 2757 |
| 19911 | AGAGUGGAAGGACAGGUAG | 1107 | 19911 | AGAGUGGAAGGACAGGUAG | 1107 | 19929 | CUACCUGUCCUUCCACUCU | 2758 |
| 19929 | GACCUUUUUAGAAACGCCC | 1108 | 19929 | GACCUUUUUAGAAACGCCC | 1108 | 19947 | GGGCGUUUCUAAAAAGGUC | 2759 |
| 19947 | CGUAAUGGUGUUUUAAUAA | 1109 | 19947 | CGUAAUGGUGUUUUAAUAA | 1109 | 19965 | UUAUUAAAACACCAUUACG | 2760 |
| 19965 | ACAGAAGGUUCAGUCAAAG | 1110 | 19965 | ACAGAAGGUUCAGUCAAAG | 1110 | 19983 | CUUUGACUGAACCUUCUGU | 2761 |
| 19983 | GGUCUAACACCUUCAAAGG | 1111 | 19983 | GGUCUAACACCUUCAAAGG | 1111 | 20001 | CCUUUGAAGGUGUUAGACC | 2762 |
| 20001 | GGACCAGCACAAGCUAGCG | 1112 | 20001 | GGACCAGCACAAGCUAGCG | 1112 | 20019 | CGCUAGCUUGUGCUGGUCC | 2763 |
| 20019 | GUCAAUGGAGUCACAUUAA | 1113 | 20019 | GUCAAUGGAGUCACAUUAA | 1113 | 20037 | UUAAUGUGACUCCAUUGAC | 2764 |
| 20037 | AUUGGAGAAUCAGUAAAAA | 1114 | 20037 | AUUGGAGAAUCAGUAAAAA | 1114 | 20055 | UUUUUACUGAUUCUCCAAU | 2765 |
| 20055 | ACACAGUUUAACUACUUUA | 1115 | 20055 | ACACAGUUUAACUACUUUA | 1115 | 20073 | UAAAGUAGUUAAACUGUGU | 2766 |
| 20073 | AAGAAAGUAGACGGCAUUA | 1116 | 20073 | AAGAAAGUAGACGGCAUUA | 1116 | 20091 | UAAUGCCGUCUACUUUCUU | 2767 |
| 20091 | AUUCAACAGUUGCCUGAAA | 1117 | 20091 | AUUCAACAGUUGCCUGAAA | 1117 | 20109 | UUUCAGGCAACUGUUGAAU | 2768 |
| 20109 | ACCUACUUUACUCAGAGCA | 1118 | 20109 | ACCUACUUUACUCAGAGCA | 1118 | 20127 | UGCUCUGAGUAAAGUAGGU | 2769 |
| 20127 | AGAGACUUAGAGGAUUUUA | 1119 | 20127 | AGAGACUUAGAGGAUUUUA | 1119 | 20145 | UAAAAUCCUCUAAGUCUCU | 2770 |
| 20145 | AAGCCCAGAUCACAAAUGG | 1120 | 20145 | AAGCCCAGAUCACAAAUGG | 1120 | 20163 | CCAUUUGUGAUCUGGGCUU | 2771 |
| 20163 | GAAACUGACUUUCUCGAGC | 1121 | 20163 | GAAACUGACUUUCUCGAGC | 1121 | 20181 | GCUCGAGAAAGUCAGUUUC | 2772 |
| 20181 | CUCGCUAUGGAUGAAUUCA | 1122 | 20181 | CUCGCUAUGGAUGAAUUCA | 1122 | 20199 | UGAAUUCAUCCAUAGCGAG | 2773 |
| 20199 | AUACAGCGAUAUAAGCUCG | 1123 | 20199 | AUACAGCGAUAUAAGCUCG | 1123 | 20217 | CGAGCUUAUAUCGCUGUAU | 2774 |
| 20217 | GAGGGCUAUGCCUUCGAAC | 1124 | 20217 | GAGGGCUAUGCCUUCGAAC | 1124 | 20235 | GUUCGAAGGCAUAGCCCUC | 2775 |
| 20235 | CACAUCGUUUAUGGAGAUU | 1125 | 20235 | CACAUCGUUUAUGGAGAUU | 1125 | 20253 | AAUCUCCAUAAACGAUGUG | 2776 |
| 20253 | UUCAGUCAUGGACAACUUG | 1126 | 20253 | UUCAGUCAUGGACAACUUG | 1126 | 20271 | CAAGUUGUCCAUGACUGAA | 2777 |
| 20271 | GGCGGUCUUCAUUUAAUGA | 1127 | 20271 | GGCGGUCUUCAUUUAAUGA | 1127 | 20289 | UCAUUAAAUGAAGACCGCC | 2778 |
| 20289 | AUAGGCUUAGCCAAGCGCU | 1128 | 20289 | AUAGGCUUAGCCAAGCGCU | 1128 | 20307 | AGCGCUUGGCUAAGCCUAU | 2779 |
| 20307 | UCACAAGAUUCACCACUUA | 1129 | 20307 | UCACAAGAUUCACCACUUA | 1129 | 20325 | UAAGUGGUGAAUCUUGUGA | 2780 |
| 20325 | AAAUUAGAGGAUUUUAUCC | 1130 | 20325 | AAAUUAGAGGAUUUUAUCC | 1130 | 20343 | GGAUAAAAUCCUCUAAUUU | 2781 |
| 20343 | CCUAUGGACAGCACAGUGA | 1131 | 20343 | CCUAUGGACAGCACAGUGA | 1131 | 20361 | UCACUGUGCUGUCCAUAGG | 2782 |
| 20361 | AAAAAUUACUUCAUAACAG | 1132 | 20361 | AAAAAUUACUUCAUAACAG | 1132 | 20379 | CUGUUAUGAAGUAAUUUUU | 2783 |
| 20379 | GAUGCGCAAACAGGUUCAU | 1133 | 20379 | GAUGCGCAAACAGGUUCAU | 1133 | 20397 | AUGAACCUGUUUGCGCAUC | 2784 |
| 20397 | UCAAAAUGUGUGUGUUCUG | 1134 | 20397 | UCAAAAUGUGUGUGUUCUG | 1134 | 20415 | CAGAACACACACAUUUUGA | 2785 |
| 20415 | GUGAUUGAUCUUUUACUUG | 1135 | 20415 | GUGAUUGAUCUUUUACUUG | 1135 | 20433 | CAAGUAAAAGAUCAAUCAC | 2786 |
| 20433 | GAUGACUUUGUCGAGAUAA | 1136 | 20433 | GAUGACUUUGUCGAGAUAA | 1136 | 20451 | UUAUCUCGACAAAGUCAUC | 2787 |
| 20451 | AUAAAGUCACAAGAUUUGU | 1137 | 20451 | AUAAAGUCACAAGAUUUGU | 1137 | 20469 | ACAAAUCUUGUGACUUUAU | 2788 |
| 20469 | UCAGUGAUUUCAAAAGUGG | 1138 | 20469 | UCAGUGAUUUCAAAAGUGG | 1138 | 20487 | CCACUUUUGAAAUCACUGA | 2789 |
| 20487 | GUCAAGGUUACAAUUGACU | 1139 | 20487 | GUCAAGGUUACAAUUGACU | 1139 | 20505 | AGUCAAUUGUAACCUUGAC | 2790 |
| 20505 | UAUGCUGAAAUUUCAUUCA | 1140 | 20505 | UAUGCUGAAAUUUCAUUCA | 1140 | 20523 | UGAAUGAAAUUUCAGCAUA | 2791 |
| 20523 | AUGCUUUGGUGUAAGGAUG | 1141 | 20523 | AUGCUUUGGUGUAAGGAUG | 1141 | 20541 | CAUCCUUACACCAAAGCAU | 2792 |
| 20541 | GGACAUGUUGAAACCUUCU | 1142 | 20541 | GGACAUGUUGAAACCUUCU | 1142 | 20559 | AGAAGGUUUCAACAUGUCC | 2793 |
| 20559 | UACCCAAAACUACAAGCAA | 1143 | 20559 | UACCCAAAACUACAAGCAA | 1143 | 20577 | UUGCUUGUAGUUUUGGGUA | 2794 |
| 20577 | AGUCGAGCGUGGCAACCAG | 1144 | 20577 | AGUCGAGCGUGGCAACCAG | 1144 | 20595 | CUGGUUGCCACGCUCGACU | 2795 |
| 20595 | GGUGUUGCGAUGCCUAACU | 1145 | 20595 | GGUGUUGCGAUGCCUAACU | 1145 | 20613 | AGUUAGGCAUCGCAACACC | 2796 |
| 20613 | UUGUACAAGAUGCAAAGAA | 1146 | 20613 | UUGUACAAGAUGCAAAGAA | 1146 | 20631 | UUCUUUGCAUCUUGUACAA | 2797 |
| 20631 | AUGCUUCUUGAAAAGUGUG | 1147 | 20631 | AUGCUUCUUGAAAAGUGUG | 1147 | 20649 | CACACUUUUCAAGAAGCAU | 2798 |
| 20649 | GACCUUCAGAAUUAUGGUG | 1148 | 20649 | GACCUUCAGAAUUAUGGUG | 1148 | 20667 | CACCAUAAUUCUGAAGGUC | 2799 |
| 20667 | GAAAAUGCUGUUAUACCAA | 1149 | 20667 | GAAAAUGCUGUUAUACCAA | 1149 | 20685 | UUGGUAUAACAGCAUUUUC | 2800 |
| 20685 | AAAGGAAUAAUGAUGAAUG | 1150 | 20685 | AAAGGAAUAAUGAUGAAUG | 1150 | 20703 | CAUUCAUCAUUAUUCCUUU | 2801 |
| 20703 | GUCGCAAAGUAUACUCAAC | 1151 | 20703 | GUCGCAAAGUAUACUCAAC | 1151 | 20721 | GUUGAGUAUACUUUGCGAC | 2802 |
| 20721 | CUGUGUCAAUACUUAAAUA | 1152 | 20721 | CUGUGUCAAUACUUAAAUA | 1152 | 20739 | UAUUUAAGUAUUGACACAG | 2803 |
| 20739 | ACACUUACUUUAGCUGUAC | 1153 | 20739 | ACACUUACUUUAGCUGUAC | 1153 | 20757 | GUACAGCUAAAGUAAGUGU | 2804 |
| 20757 | CCCUACAACAUGAGAGUUA | 1154 | 20757 | CCCUACAACAUGAGAGUUA | 1154 | 20775 | UAACUCUCAUGUUGUAGGG | 2805 |
| 20775 | AUUCACUUUGGUGCUGGCU | 1155 | 20775 | AUUCACUUUGGUGCUGGCU | 1155 | 20793 | AGCCAGCACCAAAGUGAAU | 2806 |
| 20793 | UCUGAUAAAGGAGUUGCAC | 1156 | 20793 | UCUGAUAAAGGAGUUGCAC | 1156 | 20811 | GUGCAACUCCUUUAUCAGA | 2807 |
| 20811 | CCAGGUACAGCUGUGCUCA | 1157 | 20811 | CCAGGUACAGCUGUGCUCA | 1157 | 20829 | UGAGCACAGCUGUACCUGG | 2808 |
| 20829 | AGACAAUGGUUGCCAACUG | 1158 | 20829 | AGACAAUGGUUGCCAACUG | 1158 | 20847 | CAGUUGGCAACCAUUGUCU | 2809 |
| 20847 | GGCACACUACUUGUCGAUU | 1159 | 20847 | GGCACACUACUUGUCGAUU | 1159 | 20865 | AAUCGACAAGUAGUGUGCC | 2810 |
| 20865 | UCAGAUCUUAAUGACUUCG | 1160 | 20865 | UCAGAUCUUAAUGACUUCG | 1160 | 20883 | CGAAGUCAUUAAGAUCUGA | 2811 |
| 20883 | GUCUCCGACGCAUAUUCUA | 1161 | 20883 | GUCUCCGACGCAUAUUCUA | 1161 | 20901 | UAGAAUAUGCGUCGGAGAC | 2812 |
| 20901 | ACUUUAAUUGGAGACUGUG | 1162 | 20901 | ACUUUAAUUGGAGACUGUG | 1162 | 20919 | CACAGUCUCCAAUUAAAGU | 2813 |
| 20919 | GCAACAGUACAUACGGCUA | 1163 | 20919 | GCAACAGUACAUACGGCUA | 1163 | 20937 | UAGCCGUAUGUACUGUUGC | 2814 |
| 20937 | AAUAAAUGGGACCUUAUUA | 1164 | 20937 | AAUAAAUGGGACCUUAUUA | 1164 | 20955 | UAAUAAGGUCCCAUUUAUU | 2815 |
| 20955 | AUUAGCGAUAUGUAUGACC | 1165 | 20955 | AUUAGCGAUAUGUAUGACC | 1165 | 20973 | GGUCAUACAUAUCGCUAAU | 2816 |
| 20973 | CCUAGGACCAAACAUGUGA | 1166 | 20973 | CCUAGGACCAAACAUGUGA | 1166 | 20991 | UCACAUGUUUGGUCCUAGG | 2817 |
| 20991 | ACAAAAGAGAAUGACUCUA | 1167 | 20991 | ACAAAAGAGAAUGACUCUA | 1167 | 21009 | UAGAGUCAUUCUCUUUUGU | 2818 |
| 21009 | AAAGAAGGGUUUUUCACUU | 1168 | 21009 | AAAGAAGGGUUUUUCACUU | 1168 | 21027 | AAGUGAAAAACCCUUCUUU | 2819 |
| 21027 | UAUCUGUGUGGAUUUAUAA | 1169 | 21027 | UAUCUGUGUGGAUUUAUAA | 1169 | 21045 | UUAUAAAUCCACACAGAUA | 2820 |
| 21045 | AAGCAAAAACUAGCCCUGG | 1170 | 21045 | AAGCAAAAACUAGCCCUGG | 1170 | 21063 | CCAGGGCUAGUUUUUGCUU | 2821 |
| 21063 | GGUGGUUCUAUAGCUGUAA | 1171 | 21063 | GGUGGUUCUAUAGCUGUAA | 1171 | 21081 | UUACAGCUAUAGAACCACC | 2822 |
| 21081 | AAGAUAACAGAGCAUUCUU | 1172 | 21081 | AAGAUAACAGAGCAUUCUU | 1172 | 21099 | AAGAAUGCUCUGUUAUCUU | 2823 |
| 21099 | UGGAAUGCUGACCUUUACA | 1173 | 21099 | UGGAAUGCUGACCUUUACA | 1173 | 21117 | UGUAAAGGUCAGCAUUCCA | 2824 |
| 21117 | AAGCUUAUGGGCCAUUUCU | 1174 | 21117 | AAGCUUAUGGGCCAUUUCU | 1174 | 21135 | AGAAAUGGCCCAUAAGCUU | 2825 |
| 21135 | UCAUGGUGGACAGCUUUUG | 1175 | 21135 | UCAUGGUGGACAGCUUUUG | 1175 | 21153 | CAAAAGCUGUCCACCAUGA | 2826 |
| 21153 | GUUACAAAUGUAAAUGCAU | 1176 | 21153 | GUUACAAAUGUAAAUGCAU | 1176 | 21171 | AUGCAUUUACAUUUGUAAC | 2827 |
| 21171 | UCAUCAUCGGAAGCAUUUU | 1177 | 21171 | UCAUCAUCGGAAGCAUUUU | 1177 | 21189 | AAAAUGCUUCCGAUGAUGA | 2828 |
| 21189 | UUAAUUGGGGCUAACUAUC | 1178 | 21189 | UUAAUUGGGGCUAACUAUC | 1178 | 21207 | GAUAGUUAGCCCCAAUUAA | 2829 |
| 21207 | CUUGGCAAGCCGAAGGAAC | 1179 | 21207 | CUUGGCAAGCCGAAGGAAC | 1179 | 21225 | GUUCCUUCGGCUUGCCAAG | 2830 |
| 21225 | CAAAUUGAUGGCUAUACCA | 1180 | 21225 | CAAAUUGAUGGCUAUACCA | 1180 | 21243 | UGGUAUAGCCAUCAAUUUG | 2831 |
| 21243 | AUGCAUGCUAACUACAUUU | 1181 | 21243 | AUGCAUGCUAACUACAUUU | 1181 | 21261 | AAAUGUAGUUAGCAUGCAU | 2832 |
| 21261 | UUCUGGAGGAACACAAAUC | 1182 | 21261 | UUCUGGAGGAACACAAAUC | 1182 | 21279 | GAUUUGUGUUCCUCCAGAA | 2833 |
| 21279 | CCUAUCCAGUUGUCUUCCU | 1183 | 21279 | CCUAUCCAGUUGUCUUCCU | 1183 | 21297 | AGGAAGACAACUGGAUAGG | 2834 |
| 21297 | UAUUCACUCUUUGACAUGA | 1184 | 21297 | UAUUCACUCUUUGACAUGA | 1184 | 21315 | UCAUGUCAAAGAGUGAAUA | 2835 |
| 21315 | AGCAAAUUUCCUCUUAAAU | 1185 | 21315 | AGCAAAUUUCCUCUUAAAU | 1185 | 21333 | AUUUAAGAGGAAAUUUGCU | 2836 |
| 21333 | UUAAGAGGAACUGCUGUAA | 1186 | 21333 | UUAAGAGGAACUGCUGUAA | 1186 | 21351 | UUACAGCAGUUCCUCUUAA | 2837 |
| 21351 | AUGUCUCUUAAGGAGAAUC | 1187 | 21351 | AUGUCUCUUAAGGAGAAUC | 1187 | 21369 | GAUUCUCCUUAAGAGACAU | 2838 |
| 21369 | CAAAUCAAUGAUAUGAUUU | 1188 | 21369 | CAAAUCAAUGAUAUGAUUU | 1188 | 21387 | AAAUCAUAUCAUUGAUUUG | 2839 |
| 21387 | UAUUCUCUUCUGGAAAAAG | 1189 | 21387 | UAUUCUCUUCUGGAAAAAG | 1189 | 21405 | CUUUUUCCAGAAGAGAAUA | 2840 |
| 21405 | GGUAGGCUUAUCAUUAGAG | 1190 | 21405 | GGUAGGCUUAUCAUUAGAG | 1190 | 21423 | CUCUAAUGAUAAGCCUACC | 2841 |
| 21423 | GAAAACAACAGAGUUGUGG | 1191 | 21423 | GAAAACAACAGAGUUGUGG | 1191 | 21441 | CCACAACUCUGUUGUUUUC | 2842 |
| 21441 | GUUUCAAGUGAUAUUCUUG | 1192 | 21441 | GUUUCAAGUGAUAUUCUUG | 1192 | 21459 | CAAGAAUAUCACUUGAAAC | 2843 |
| 21459 | GUUAACAACUAAACGAACA | 1193 | 21459 | GUUAACAACUAAACGAACA | 1193 | 21477 | UGUUCGUUUAGUUGUUAAC | 2844 |
| 21477 | AUGUUUAUUUUCUUAUUAU | 1194 | 21477 | AUGUUUAUUUUCUUAUUAU | 1194 | 21495 | AUAAUAAGAAAAUAAACAU | 2845 |
| 21495 | UUUCUUACUCUCACUAGUG | 1195 | 21495 | UUUCUUACUCUCACUAGUG | 1195 | 21513 | CACUAGUGAGAGUAAGAAA | 2846 |
| 21513 | GGUAGUGACCUUGACCGGU | 1196 | 21513 | GGUAGUGACCUUGACCGGU | 1196 | 21531 | ACCGGUCAAGGUCACUACC | 2847 |
| 21531 | UGCACCACUUUUGAUGAUG | 1197 | 21531 | UGCACCACUUUUGAUGAUG | 1197 | 21549 | CAUCAUCAAAAGUGGUGCA | 2848 |
| 21549 | GUUCAAGCUCCUAAUUACA | 1198 | 21549 | GUUCAAGCUCCUAAUUACA | 1198 | 21567 | UGUAAUUAGGAGCUUGAAC | 2849 |
| 21567 | ACUCAACAUACUUCAUCUA | 1199 | 21567 | ACUCAACAUACUUCAUCUA | 1199 | 21585 | UAGAUGAAGUAUGUUGAGU | 2850 |
| 21585 | AUGAGGGGGGUUUACUAUC | 1200 | 21585 | AUGAGGGGGGUUUACUAUC | 1200 | 21603 | GAUAGUAAACCCCCCUCAU | 2851 |
| 21603 | CCUGAUGAAAUUUUUAGAU | 1201 | 21603 | CCUGAUGAAAUUUUUAGAU | 1201 | 21621 | AUCUAAAAAUUUCAUCAGG | 2852 |
| 21621 | UCAGACACUCUUUAUUUAA | 1202 | 21621 | UCAGACACUCUUUAUUUAA | 1202 | 21639 | UUAAAUAAAGAGUGUCUGA | 2853 |
| 21639 | ACUCAGGAUUUAUUUCUUC | 1203 | 21639 | ACUCAGGAUUUAUUUCUUC | 1203 | 21657 | GAAGAAAUAAAUCCUGAGU | 2854 |
| 21657 | CCAUUUUAUUCUAAUGUUA | 1204 | 21657 | CCAUUUUAUUCUAAUGUUA | 1204 | 21675 | UAACAUUAGAAUAAAAUGG | 2855 |
| 21675 | ACAGGGUUUCAUACUAUUA | 1205 | 21675 | ACAGGGUUUCAUACUAUUA | 1205 | 21693 | UAAUAGUAUGAAACCCUGU | 2856 |
| 21693 | AAUCAUACGUUUGGCAACC | 1206 | 21693 | AAUCAUACGUUUGGCAACC | 1206 | 21711 | GGUUGCCAAACGUAUGAUU | 2857 |
| 21711 | CCUGUCAUACCUUUUAAGG | 1207 | 21711 | CCUGUCAUACCUUUUAAGG | 1207 | 21729 | CCUUAAAAGGUAUGACAGG | 2858 |
| 21729 | GAUGGUAUUUAUUUUGCUG | 1208 | 21729 | GAUGGUAUUUAUUUUGCUG | 1208 | 21747 | CAGCAAAAUAAAUACCAUC | 2859 |
| 21747 | GCCACAGAGAAAUCAAAUG | 1209 | 21747 | GCCACAGAGAAAUCAAAUG | 1209 | 21765 | CAUUUGAUUUCUCUGUGGC | 2860 |
| 21765 | GUUGUCCGUGGUUGGGUUU | 1210 | 21765 | GUUGUCCGUGGUUGGGUUU | 1210 | 21783 | AAACCCAACCACGGACAAC | 2861 |
| 21783 | UUUGGUUCUACCAUGAACA | 1211 | 21783 | UUUGGUUCUACCAUGAACA | 1211 | 21801 | UGUUCAUGGUAGAACCAAA | 2862 |
| 21801 | AACAAGUCACAGUCGGUGA | 1212 | 21801 | AACAAGUCACAGUCGGUGA | 1212 | 21819 | UCACCGACUGUGACUUGUU | 2863 |
| 21819 | AUUAUUAUUAACAAUUCUA | 1213 | 21819 | AUUAUUAUUAACAAUUCUA | 1213 | 21837 | UAGAAUUGUUAAUAAUAAU | 2864 |
| 21837 | ACUAAUGUUGUUAUACGAG | 1214 | 21837 | ACUAAUGUUGUUAUACGAG | 1214 | 21855 | CUCGUAUAACAACAUUAGU | 2865 |
| 21855 | GCAUGUAACUUUGAAUUGU | 1215 | 21855 | GCAUGUAACUUUGAAUUGU | 1215 | 21873 | ACAAUUCAAAGUUACAUGC | 2866 |
| 21873 | UGUGACAACCCUUUCUUUG | 1216 | 21873 | UGUGACAACCCUUUCUUUG | 1216 | 21891 | CAAAGAAAGGGUUGUCACA | 2867 |
| 21891 | GCUGUUUCUAAACCCAUGG | 1217 | 21891 | GCUGUUUCUAAACCCAUGG | 1217 | 21909 | CCAUGGGUUUAGAAACAGC | 2868 |
| 21909 | GGUACACAGACACAUACUA | 1218 | 21909 | GGUACACAGACACAUACUA | 1218 | 21927 | UAGUAUGUGUCUGUGUACC | 2869 |
| 21927 | AUGAUAUUCGAUAAUGCAU | 1219 | 21927 | AUGAUAUUCGAUAAUGCAU | 1219 | 21945 | AUGCAUUAUCGAAUAUCAU | 2870 |
| 21945 | UUUAAUUGCACUUUCGAGU | 1220 | 21945 | UUUAAUUGCACUUUCGAGU | 1220 | 21963 | ACUCGAAAGUGCAAUUAAA | 2871 |
| 21963 | UACAUAUCUGAUGCCUUUU | 1221 | 21963 | UACAUAUCUGAUGCCUUUU | 1221 | 21981 | AAAAGGCAUCAGAUAUGUA | 2872 |
| 21981 | UCGCUUGAUGUUUCAGAAA | 1222 | 21981 | UCGCUUGAUGUUUCAGAAA | 1222 | 21999 | UUUCUGAAACAUCAAGCGA | 2873 |
| 21999 | AAGUCAGGUAAUUUUAAAC | 1223 | 21999 | AAGUCAGGUAAUUUUAAAC | 1223 | 22017 | GUUUAAAAUUACCUGACUU | 2874 |
| 22017 | CACUUACGAGAGUUUGUGU | 1224 | 22017 | CACUUACGAGAGUUUGUGU | 1224 | 22035 | ACACAAACUCUCGUAAGUG | 2875 |
| 22035 | UUUAAAAAUAAAGAUGGGU | 1225 | 22035 | UUUAAAAAUAAAGAUGGGU | 1225 | 22053 | ACCCAUCUUUAUUUUUAAA | 2876 |
| 22053 | UUUCUCUAUGUUUAUAAGG | 1226 | 22053 | UUUCUCUAUGUUUAUAAGG | 1226 | 22071 | CCUUAUAAACAUAGAGAAA | 2877 |
| 22071 | GGCUAUCAACCUAUAGAUG | 1227 | 22071 | GGCUAUCAACCUAUAGAUG | 1227 | 22089 | CAUCUAUAGGUUGAUAGCC | 2878 |
| 22089 | GUAGUUCGUGAUCUACCUU | 1228 | 22089 | GUAGUUCGUGAUCUACCUU | 1228 | 22107 | AAGGUAGAUCACGAACUAC | 2879 |
| 22107 | UCUGGUUUUAACACUUUGA | 1229 | 22107 | UCUGGUUUUAACACUUUGA | 1229 | 22125 | UCAAAGUGUUAAAACCAGA | 2880 |
| 22125 | AAACCUAUUUUUAAGUUGC | 1230 | 22125 | AAACCUAUUUUUAAGUUGC | 1230 | 22143 | GCAACUUAAAAAUAGGUUU | 2881 |
| 22143 | CCUCUUGGUAUUAACAUUA | 1231 | 22143 | CCUCUUGGUAUUAACAUUA | 1231 | 22161 | UAAUGUUAAUACCAAGAGG | 2882 |
| 22161 | ACAAAUUUUAGAGCCAUUC | 1232 | 22161 | ACAAAUUUUAGAGCCAUUC | 1232 | 22179 | GAAUGGCUCUAAAAUUUGU | 2883 |
| 22179 | CUUACAGCCUUUUCACCUG | 1233 | 22179 | CUUACAGCCUUUUCACCUG | 1233 | 22197 | CAGGUGAAAAGGCUGUAAG | 2884 |
| 22197 | GCUCAAGACAUUUGGGGCA | 1234 | 22197 | GCUCAAGACAUUUGGGGCA | 1234 | 22215 | UGCCCCAAAUGUCUUGAGC | 2885 |
| 22215 | ACGUCAGCUGCAGCCUAUU | 1235 | 22215 | ACGUCAGCUGCAGCCUAUU | 1235 | 22233 | AAUAGGCUGCAGCUGACGU | 2886 |
| 22233 | UUUGUUGGCUAUUUAAAGC | 1236 | 22233 | UUUGUUGGCUAUUUAAAGC | 1236 | 22251 | GCUUUAAAUAGCCAACAAA | 2887 |
| 22251 | CCAACUACAUUUAUGCUCA | 1237 | 22251 | CCAACUACAUUUAUGCUCA | 1237 | 22269 | UGAGCAUAAAUGUAGUUGG | 2888 |
| 22269 | AAGUAUGAUGAAAAUGGUA | 1238 | 22269 | AAGUAUGAUGAAAAUGGUA | 1238 | 22287 | UACCAUUUUCAUCAUACUU | 2889 |
| 22287 | ACAAUCACAGAUGCUGUUG | 1239 | 22287 | ACAAUCACAGAUGCUGUUG | 1239 | 22305 | CAACAGCAUCUGUGAUUGU | 2890 |
| 22305 | GAUUGUUCUCAAAAUCCAC | 1240 | 22305 | GAUUGUUCUCAAAAUCCAC | 1240 | 22323 | GUGGAUUUUGAGAACAAUC | 2891 |
| 22323 | CUUGCUGAACUCAAAUGCU | 1241 | 22323 | CUUGCUGAACUCAAAUGCU | 1241 | 22341 | AGCAUUUGAGUUCAGCAAG | 2892 |
| 22341 | UCUGUUAAGAGCUUUGAGA | 1242 | 22341 | UCUGUUAAGAGCUUUGAGA | 1242 | 22359 | UCUCAAAGCUCUUAACAGA | 2893 |
| 22359 | AUUGACAAAGGAAUUUACC | 1243 | 22359 | AUUGACAAAGGAAUUUACC | 1243 | 22377 | GGUAAAUUCCUUUGUCAAU | 2894 |
| 22377 | CAGACCUCUAAUUUCAGGG | 1244 | 22377 | CAGACCUCUAAUUUCAGGG | 1244 | 22395 | CCCUGAAAUUAGAGGUCUG | 2895 |
| 22395 | GUUGUUCCCUCAGGAGAUG | 1245 | 22395 | GUUGUUCCCUCAGGAGAUG | 1245 | 22413 | CAUCUCCUGAGGGAACAAC | 2896 |
| 22413 | GUUGUGAGAUUCCCUAAUA | 1246 | 22413 | GUUGUGAGAUUCCCUAAUA | 1246 | 22431 | UAUUAGGGAAUCUCACAAC | 2897 |
| 22431 | AUUACAAACUUGUGUCCUU | 1247 | 22431 | AUUACAAACUUGUGUCCUU | 1247 | 22449 | AAGGACACAAGUUUGUAAU | 2898 |
| 22449 | UUUGGAGAGGUUUUUAAUG | 1248 | 22449 | UUUGGAGAGGUUUUUAAUG | 1248 | 22467 | CAUUAAAAACCUCUCCAAA | 2899 |
| 22467 | GCUACUAAAUUCCCUUCUG | 1249 | 22467 | GCUACUAAAUUCCCUUCUG | 1249 | 22485 | CAGAAGGGAAUUUAGUAGC | 2900 |
| 22485 | GUCUAUGCAUGGGAGAGAA | 1250 | 22485 | GUCUAUGCAUGGGAGAGAA | 1250 | 22503 | UUCUCUCCCAUGCAUAGAC | 2901 |
| 22503 | AAAAAAAUUUCUAAUUGUG | 1251 | 22503 | AAAAAAAUUUCUAAUUGUG | 1251 | 22521 | CACAAUUAGAAAUUUUUUU | 2902 |
| 22521 | GUUGCUGAUUACUCUGUGC | 1252 | 22521 | GUUGCUGAUUACUCUGUGC | 1252 | 22539 | GCACAGAGUAAUCAGCAAC | 2903 |
| 22539 | CUCUACAACUCAACAUUUU | 1253 | 22539 | CUCUACAACUCAACAUUUU | 1253 | 22557 | AAAAUGUUGAGUUGUAGAG | 2904 |
| 22557 | UUUUCAACCUUUAAGUGCU | 1254 | 22557 | UUUUCAACCUUUAAGUGCU | 1254 | 22575 | AGCACUUAAAGGUUGAAAA | 2905 |
| 22575 | UAUGGCGUUUCUGCCACUA | 1255 | 22575 | UAUGGCGUUUCUGCCACUA | 1255 | 22593 | UAGUGGCAGAAACGCCAUA | 2906 |
| 22593 | AAGUUGAAUGAUCUUUGCU | 1256 | 22593 | AAGUUGAAUGAUCUUUGCU | 1256 | 22611 | AGCAAAGAUCAUUCAACUU | 2907 |
| 22611 | UUCUCCAAUGUCUAUGCAG | 1257 | 22611 | UUCUCCAAUGUCUAUGCAG | 1257 | 22629 | CUGCAUAGACAUUGGAGAA | 2908 |
| 22629 | GAUUCUUUUGUAGUCAAGG | 1258 | 22629 | GAUUCUUUUGUAGUCAAGG | 1258 | 22647 | CCUUGACUACAAAAGAAUC | 2909 |
| 22647 | GGAGAUGAUGUAAGACAAA | 1259 | 22647 | GGAGAUGAUGUAAGACAAA | 1259 | 22665 | UUUGUCUUACAUCAUCUCC | 2910 |
| 22665 | AUAGCGCCAGGACAAACUG | 1260 | 22665 | AUAGCGCCAGGACAAACUG | 1260 | 22683 | CAGUUUGUCCUGGCGCUAU | 2911 |
| 22683 | GGUGUUAUUGCUGAUUAUA | 1261 | 22683 | GGUGUUAUUGCUGAUUAUA | 1261 | 22701 | UAUAAUCAGCAAUAACACC | 2912 |
| 22701 | AAUUAUAAAUUGCCAGAUG | 1262 | 22701 | AAUUAUAAAUUGCCAGAUG | 1262 | 22719 | CAUCUGGCAAUUUAUAAUU | 2913 |
| 22719 | GAUUUCAUGGGUUGUGUCC | 1263 | 22719 | GAUUUCAUGGGUUGUGUCC | 1263 | 22737 | GGACACAACCCAUGAAAUC | 2914 |
| 22737 | CUUGCUUGGAAUACUAGGA | 1264 | 22737 | CUUGCUUGGAAUACUAGGA | 1264 | 22755 | UCCUAGUAUUCCAAGCAAG | 2915 |
| 22755 | AACAUUGAUGCUACUUCAA | 1265 | 22755 | AACAUUGAUGCUACUUCAA | 1265 | 22773 | UUGAAGUAGCAUCAAUGUU | 2916 |
| 22773 | ACUGGUAAUUAUAAUUAUA | 1266 | 22773 | ACUGGUAAUUAUAAUUAUA | 1266 | 22791 | UAUAAUUAUAAUUACCAGU | 2917 |
| 22791 | AAAUAUAGGUAUCUUAGAC | 1267 | 22791 | AAAUAUAGGUAUCUUAGAC | 1267 | 22809 | GUCUAAGAUACCUAUAUUU | 2918 |
| 22809 | CAUGGCAAGCUUAGGCCCU | 1268 | 22809 | CAUGGCAAGCUUAGGCCCU | 1268 | 22827 | AGGGCCUAAGCUUGCCAUG | 2919 |
| 22827 | UUUGAGAGAGACAUAUCUA | 1269 | 22827 | UUUGAGAGAGACAUAUCUA | 1269 | 22845 | UAGAUAUGUCUCUCUCAAA | 2920 |
| 22845 | AAUGUGCCUUUCUCCCCUG | 1270 | 22845 | AAUGUGCCUUUCUCCCCUG | 1270 | 22863 | CAGGGGAGAAAGGCACAUU | 2921 |
| 22863 | GAUGGCAAACCUUGCACCC | 1271 | 22863 | GAUGGCAAACCUUGCACCC | 1271 | 22881 | GGGUGCAAGGUUUGCCAUC | 2922 |
| 22881 | CCACCUGCUCUUAAUUGUU | 1272 | 22881 | CCACCUGCUCUUAAUUGUU | 1272 | 22899 | AACAAUUAAGAGCAGGUGG | 2923 |
| 22899 | UAUUGGCCAUUAAAUGAUU | 1273 | 22899 | UAUUGGCCAUUAAAUGAUU | 1273 | 22917 | AAUCAUUUAAUGGCCAAUA | 2924 |
| 22917 | UAUGGUUUUUACACCACUA | 1274 | 22917 | UAUGGUUUUUACACCACUA | 1274 | 22935 | UAGUGGUGUAAAAACCAUA | 2925 |
| 22935 | ACUGGCAUUGGCUACCAAC | 1275 | 22935 | ACUGGCAUUGGCUACCAAC | 1275 | 22953 | GUUGGUAGCCAAUGCCAGU | 2926 |
| 22953 | CCUUACAGAGUUGUAGUAC | 1276 | 22953 | CCUUACAGAGUUGUAGUAC | 1276 | 22971 | GUACUACAACUCUGUAAGG | 2927 |
| 22971 | CUUUCUUUUGAACUUUUAA | 1277 | 22971 | CUUUCUUUUGAACUUUUAA | 1277 | 22989 | UUAAAAGUUCAAAAGAAAG | 2928 |
| 22989 | AAUGCACCGGCCACGGUUU | 1278 | 22989 | AAUGCACCGGCCACGGUUU | 1278 | 23007 | AAACCGUGGCCGGUGCAUU | 2929 |
| 23007 | UGUGGACCAAAAUUAUCCA | 1279 | 23007 | UGUGGACCAAAAUUAUCCA | 1279 | 23025 | UGGAUAAUUUUGGUCCACA | 2930 |
| 23025 | ACUGACCUUAUUAAGAACC | 1280 | 23025 | ACUGACCUUAUUAAGAACC | 1280 | 23043 | GGUUCUUAAUAAGGUCAGU | 2931 |
| 23043 | CAGUGUGUCAAUUUUAAUU | 1281 | 23043 | CAGUGUGUCAAUUUUAAUU | 1281 | 23061 | AAUUAAAAUUGACACACUG | 2932 |
| 23061 | UUUAAUGGACUCACUGGUA | 1282 | 23061 | UUUAAUGGACUCACUGGUA | 1282 | 23079 | UACCAGUGAGUCCAUUAAA | 2933 |
| 23079 | ACUGGUGUGUUAACUCCUU | 1283 | 23079 | ACUGGUGUGUUAACUCCUU | 1283 | 23097 | AAGGAGUUAACACACCAGU | 2934 |
| 23097 | UCUUCAAAGAGAUUUCAAC | 1284 | 23097 | UCUUCAAAGAGAUUUCAAC | 1284 | 23115 | GUUGAAAUCUCUUUGAAGA | 2935 |
| 23115 | CCAUUUCAACAAUUUGGCC | 1285 | 23115 | CCAUUUCAACAAUUUGGCC | 1285 | 23133 | GGCCAAAUUGUUGAAAUGG | 2936 |
| 23133 | CGUGAUGUUUCUGAUUUCA | 1286 | 23133 | CGUGAUGUUUCUGAUUUCA | 1286 | 23151 | UGAAAUCAGAAACAUCACG | 2937 |
| 23151 | ACUGAUUCCGUUCGAGAUC | 1287 | 23151 | ACUGAUUCCGUUCGAGAUC | 1287 | 23169 | GAUCUCGAACGGAAUCAGU | 2938 |
| 23169 | CCUAAAACAUCUGAAAUAU | 1288 | 23169 | CCUAAAACAUCUGAAAUAU | 1288 | 23187 | AUAUUUCAGAUGUUUUAGG | 2939 |
| 23187 | UUAGACAUUUCACCUUGCG | 1289 | 23187 | UUAGACAUUUCACCUUGCG | 1289 | 23205 | CGCAAGGUGAAAUGUCUAA | 2940 |
| 23205 | GCUUUUGGGGGUGUAAGUG | 1290 | 23205 | GCUUUUGGGGGUGUAAGUG | 1290 | 23223 | CACUUACACCCCCAAAAGC | 2941 |
| 23223 | GUAAUUACACCUGGAACAA | 1291 | 23223 | GUAAUUACACCUGGAACAA | 1291 | 23241 | UUGUUCCAGGUGUAAUUAC | 2942 |
| 23241 | AAUGCUUCAUCUGAAGUUG | 1292 | 23241 | AAUGCUUCAUCUGAAGUUG | 1292 | 23259 | CAACUUCAGAUGAAGCAUU | 2943 |
| 23259 | GCUGUUCUAUAUCAAGAUG | 1293 | 23259 | GCUGUUCUAUAUCAAGAUG | 1293 | 23277 | CAUCUUGAUAUAGAACAGC | 2944 |
| 23277 | GUUAACUGCACUGAUGUUU | 1294 | 23277 | GUUAACUGCACUGAUGUUU | 1294 | 23295 | AAACAUCAGUGCAGUUAAC | 2945 |
| 23295 | UCUACAGCAAUUCAUGCAG | 1295 | 23295 | UCUACAGCAAUUCAUGCAG | 1295 | 23313 | CUGCAUGAAUUGCUGUAGA | 2946 |
| 23313 | GAUCAACUCACACCAGCUU | 1296 | 23313 | GAUCAACUCACACCAGCUU | 1296 | 23331 | AAGCUGGUGUGAGUUGAUC | 2947 |
| 23331 | UGGCGCAUAUAUUCUACUG | 1297 | 23331 | UGGCGCAUAUAUUCUACUG | 1297 | 23349 | CAGUAGAAUAUAUGCGCCA | 2948 |
| 23349 | GGAAACAAUGUAUUCCAGA | 1298 | 23349 | GGAAACAAUGUAUUCCAGA | 1298 | 23367 | UCUGGAAUACAUUGUUUCC | 2949 |
| 23367 | ACUCAAGCAGGCUGUCUUA | 1299 | 23367 | ACUCAAGCAGGCUGUCUUA | 1299 | 23385 | UAAGACAGCCUGCUUGAGU | 2950 |
| 23385 | AUAGGAGCUGAGCAUGUCG | 1300 | 23385 | AUAGGAGCUGAGCAUGUCG | 1300 | 23403 | CGACAUGCUCAGCUCCUAU | 2951 |
| 23403 | GACACUUCUUAUGAGUGCG | 1301 | 23403 | GACACUUCUUAUGAGUGCG | 1301 | 23421 | CGCACUCAUAAGAAGUGUC | 2952 |
| 23421 | GACAUUCCUAUUGGAGCUG | 1302 | 23421 | GACAUUCCUAUUGGAGCUG | 1302 | 23439 | CAGCUCCAAUAGGAAUGUC | 2953 |
| 23439 | GGCAUUUGUGCUAGUUACC | 1303 | 23439 | GGCAUUUGUGCUAGUUACC | 1303 | 23457 | GGUAACUAGCACAAAUGCC | 2954 |
| 23457 | CAUACAGUUUCUUUAUUAC | 1304 | 23457 | CAUACAGUUUCUUUAUUAC | 1304 | 23475 | GUAAUAAAGAAACUGUAUG | 2955 |
| 23475 | CGUAGUACUAGCCAAAAAU | 1305 | 23475 | CGUAGUACUAGCCAAAAAU | 1305 | 23493 | AUUUUUGGCUAGUACUACG | 2956 |
| 23493 | UCUAUUGUGGCUUAUACUA | 1306 | 23493 | UCUAUUGUGGCUUAUACUA | 1306 | 23511 | UAGUAUAAGCCACAAUAGA | 2957 |
| 23511 | AUGUCUUUAGGUGCUGAUA | 1307 | 23511 | AUGUCUUUAGGUGCUGAUA | 1307 | 23529 | UAUCAGCACCUAAAGACAU | 2958 |
| 23529 | AGUUCAAUUGCUUACUCUA | 1308 | 23529 | AGUUCAAUUGCUUACUCUA | 1308 | 23547 | UAGAGUAAGCAAUUGAACU | 2959 |
| 23547 | AAUAACACCAUUGCUAUAC | 1309 | 23547 | AAUAACACCAUUGCUAUAC | 1309 | 23565 | GUAUAGCAAUGGUGUUAUU | 2960 |
| 23565 | CCUACUAACUUUUCAAUUA | 1310 | 23565 | CCUACUAACUUUUCAAUUA | 1310 | 23583 | UAAUUGAAAAGUUAGUAGG | 2961 |
| 23583 | AGCAUUACUACAGAAGUAA | 1311 | 23583 | AGCAUUACUACAGAAGUAA | 1311 | 23601 | UUACUUCUGUAGUAAUGCU | 2962 |
| 23601 | AUGCCUGUUUCUAUGGCUA | 1312 | 23601 | AUGCCUGUUUCUAUGGCUA | 1312 | 23619 | UAGCCAUAGAAACAGGCAU | 2963 |
| 23619 | AAAACCUCCGUAGAUUGUA | 1313 | 23619 | AAAACCUCCGUAGAUUGUA | 1313 | 23637 | UACAAUCUACGGAGGUUUU | 2964 |
| 23637 | AAUAUGUACAUCUGCGGAG | 1314 | 23637 | AAUAUGUACAUCUGCGGAG | 1314 | 23655 | CUCCGCAGAUGUACAUAUU | 2965 |
| 23655 | GAUUCUACUGAAUGUGCUA | 1315 | 23655 | GAUUCUACUGAAUGUGCUA | 1315 | 23673 | UAGCACAUUCAGUAGAAUC | 2966 |
| 23673 | AAUUUGCUUCUCCAAUAUG | 1316 | 23673 | AAUUUGCUUCUCCAAUAUG | 1316 | 23691 | CAUAUUGGAGAAGCAAAUU | 2967 |
| 23691 | GGUAGCUUUUGCACACAAC | 1317 | 23691 | GGUAGCUUUUGCACACAAC | 1317 | 23709 | GUUGUGUGCAAAAGCUACC | 2968 |
| 23709 | CUAAAUCGUGCACUCUCAG | 1318 | 23709 | CUAAAUCGUGCACUCUCAG | 1318 | 23727 | CUGAGAGUGCACGAUUUAG | 2969 |
| 23727 | GGUAUUGCUGCUGAACAGG | 1319 | 23727 | GGUAUUGCUGCUGAACAGG | 1319 | 23745 | CCUGUUCAGCAGCAAUACC | 2970 |
| 23745 | GAUCGCAACACACGUGAAG | 1320 | 23745 | GAUCGCAACACACGUGAAG | 1320 | 23763 | CUUCACGUGUGUUGCGAUC | 2971 |
| 23763 | GUGUUCGCUCAAGUCAAAC | 1321 | 23763 | GUGUUCGCUCAAGUCAAAC | 1321 | 23781 | GUUUGACUUGAGCGAACAC | 2972 |
| 23781 | CAAAUGUACAAAACCCCAA | 1322 | 23781 | CAAAUGUACAAAACCCCAA | 1322 | 23799 | UUGGGGUUUUGUACAUUUG | 2973 |
| 23799 | ACUUUGAAAUAUUUUGGUG | 1323 | 23799 | ACUUUGAAAUAUUUUGGUG | 1323 | 23817 | CACCAAAAUAUUUCAAAGU | 2974 |
| 23817 | GGUUUUAAUUUUUCACAAA | 1324 | 23817 | GGUUUUAAUUUUUCACAAA | 1324 | 23835 | UUUGUGAAAAAUUAAAACC | 2975 |
| 23835 | AUAUUACCUGACCCUCUAA | 1325 | 23835 | AUAUUACCUGACCCUCUAA | 1325 | 23853 | UUAGAGGGUCAGGUAAUAU | 2976 |
| 23853 | AAGCCAACUAAGAGGUCUU | 1326 | 23853 | AAGCCAACUAAGAGGUCUU | 1326 | 23871 | AAGACCUCUUAGUUGGCUU | 2977 |
| 23871 | UUUAUUGAGGACUUGCUCU | 1327 | 23871 | UUUAUUGAGGACUUGCUCU | 1327 | 23889 | AGAGCAAGUCCUCAAUAAA | 2978 |
| 23889 | UUUAAUAAGGUGACACUCG | 1328 | 23889 | UUUAAUAAGGUGACACUCG | 1328 | 23907 | CGAGUGUCACCUUAUUAAA | 2979 |
| 23907 | GCUGAUGCUGGCUUCAUGA | 1329 | 23907 | GCUGAUGCUGGCUUCAUGA | 1329 | 23925 | UCAUGAAGCCAGCAUCAGC | 2980 |
| 23925 | AAGCAAUAUGGCGAAUGCC | 1330 | 23925 | AAGCAAUAUGGCGAAUGCC | 1330 | 23943 | GGCAUUCGCCAUAUUGCUU | 2981 |
| 23943 | CUAGGUGAUAUUAAUGCUA | 1331 | 23943 | CUAGGUGAUAUUAAUGCUA | 1331 | 23961 | UAGCAUUAAUAUCACCUAG | 2982 |
| 23961 | AGAGAUCUCAUUUGUGCGC | 1332 | 23961 | AGAGAUCUCAUUUGUGCGC | 1332 | 23979 | GCGCACAAAUGAGAUCUCU | 2983 |
| 23979 | CAGAAGUUCAAUGGACUUA | 1333 | 23979 | CAGAAGUUCAAUGGACUUA | 1333 | 23997 | UAAGUCCAUUGAACUUCUG | 2984 |
| 23997 | ACAGUGUUGCCACCUCUGC | 1334 | 23997 | ACAGUGUUGCCACCUCUGC | 1334 | 24015 | GCAGAGGUGGCAACACUGU | 2985 |
| 24015 | CUCACUGAUGAUAUGAUUG | 1335 | 24015 | CUCACUGAUGAUAUGAUUG | 1335 | 24033 | CAAUCAUAUCAUCAGUGAG | 2986 |
| 24033 | GCUGCCUACACUGCUGCUC | 1336 | 24033 | GCUGCCUACACUGCUGCUC | 1336 | 24051 | GAGCAGCAGUGUAGGCAGC | 2987 |
| 24051 | CUAGUUAGUGGUACUGCCA | 1337 | 24051 | CUAGUUAGUGGUACUGCCA | 1337 | 24069 | UGGCAGUACCACUAACUAG | 2988 |
| 24069 | ACUGCUGGAUGGACAUUUG | 1338 | 24069 | ACUGCUGGAUGGACAUUUG | 1338 | 24087 | CAAAUGUCCAUCCAGCAGU | 2989 |
| 24087 | GGUGCUGGCGCUGCUCUUC | 1339 | 24087 | GGUGCUGGCGCUGCUCUUC | 1339 | 24105 | GAAGAGCAGCGCCAGCACC | 2990 |
| 24105 | CAAAUACCUUUUGCUAUGC | 1340 | 24105 | CAAAUACCUUUUGCUAUGC | 1340 | 24123 | GCAUAGCAAAAGGUAUUUG | 2991 |
| 24123 | CAAAUGGCAUAUAGGUUCA | 1341 | 24123 | CAAAUGGCAUAUAGGUUCA | 1341 | 24141 | UGAACCUAUAUGCCAUUUG | 2992 |
| 24141 | AAUGGCAUUGGAGUUACCC | 1342 | 24141 | AAUGGCAUUGGAGUUACCC | 1342 | 24159 | GGGUAACUCCAAUGCCAUU | 2993 |
| 24159 | CAAAAUGUUCUCUAUGAGA | 1343 | 24159 | CAAAAUGUUCUCUAUGAGA | 1343 | 24177 | UCUCAUAGAGAACAUUUUG | 2994 |
| 24177 | AACCAAAAACAAAUCGCCA | 1344 | 24177 | AACCAAAAACAAAUCGCCA | 1344 | 24195 | UGGCGAUUUGUUUUUGGUU | 2995 |
| 24195 | AACCAAUUUAACAAGGCGA | 1345 | 24195 | AACCAAUUUAACAAGGCGA | 1345 | 24213 | UCGCCUUGUUAAAUUGGUU | 2996 |
| 24213 | AUUAGUCAAAUUCAAGAAU | 1346 | 24213 | AUUAGUCAAAUUCAAGAAU | 1346 | 24231 | AUUCUUGAAUUUGACUAAU | 2997 |
| 24231 | UCACUUACAACAACAUCAA | 1347 | 24231 | UCACUUACAACAACAUCAA | 1347 | 24249 | UUGAUGUUGUUGUAAGUGA | 2998 |
| 24249 | ACUGCAUUGGGCAAGCUGC | 1348 | 24249 | ACUGCAUUGGGCAAGCUGC | 1348 | 24267 | GCAGCUUGCCCAAUGCAGU | 2999 |
| 24267 | CAAGACGUUGUUAACCAGA | 1349 | 24267 | CAAGACGUUGUUAACCAGA | 1349 | 24285 | UCUGGUUAACAACGUCUUG | 3000 |
| 24285 | AAUGCUCAAGCAUUAAACA | 1350 | 24285 | AAUGCUCAAGCAUUAAACA | 1350 | 24303 | UGUUUAAUGCUUGAGCAUU | 3001 |
| 24303 | ACACUUGUUAAACAACUUA | 1351 | 24303 | ACACUUGUUAAACAACUUA | 1351 | 24321 | UAAGUUGUUUAACAAGUGU | 3002 |
| 24321 | AGCUCUAAUUUUGGUGCAA | 1352 | 24321 | AGCUCUAAUUUUGGUGCAA | 1352 | 24339 | UUGCACCAAAAUUAGAGCU | 3003 |
| 24339 | AUUUCAAGUGUGCUAAAUG | 1353 | 24339 | AUUUCAAGUGUGCUAAAUG | 1353 | 24357 | CAUUUAGCACACUUGAAAU | 3004 |
| 24357 | GAUAUCCUUUCGCGACUUG | 1354 | 24357 | GAUAUCCUUUCGCGACUUG | 1354 | 24375 | CAAGUCGCGAAAGGAUAUC | 3005 |
| 24375 | GAUAAAGUCGAGGCGGAGG | 1355 | 24375 | GAUAAAGUCGAGGCGGAGG | 1355 | 24393 | CCUCCGCCUCGACUUUAUC | 3006 |
| 24393 | GUACAAAUUGACAGGUUAA | 1356 | 24393 | GUACAAAUUGACAGGUUAA | 1356 | 24411 | UUAACCUGUCAAUUUGUAC | 3007 |
| 24411 | AUUACAGGCAGACUUCAAA | 1357 | 24411 | AUUACAGGCAGACUUCAAA | 1357 | 24429 | UUUGAAGUCUGCCUGUAAU | 3008 |
| 24429 | AGCCUUCAAACCUAUGUAA | 1358 | 24429 | AGCCUUCAAACCUAUGUAA | 1358 | 24447 | UUACAUAGGUUUGAAGGCU | 3009 |
| 24447 | ACACAACAACUAAUCAGGG | 1359 | 24447 | ACACAACAACUAAUCAGGG | 1359 | 24465 | CCCUGAUUAGUUGUUGUGU | 3010 |
| 24465 | GCUGCUGAAAUCAGGGCUU | 1360 | 24465 | GCUGCUGAAAUCAGGGCUU | 1360 | 24483 | AAGCCCUGAUUUCAGCAGC | 3011 |
| 24483 | UCUGCUAAUCUUGCUGCUA | 1361 | 24483 | UCUGCUAAUCUUGCUGCUA | 1361 | 24501 | UAGCAGCAAGAUUAGCAGA | 3012 |
| 24501 | ACUAAAAUGUCUGAGUGUG | 1362 | 24501 | ACUAAAAUGUCUGAGUGUG | 1362 | 24519 | CACACUCAGACAUUUUAGU | 3013 |
| 24519 | GUUCUUGGACAAUCAAAAA | 1363 | 24519 | GUUCUUGGACAAUCAAAAA | 1363 | 24537 | UUUUUGAUUGUCCAAGAAC | 3014 |
| 24537 | AGAGUUGACUUUUGUGGAA | 1364 | 24537 | AGAGUUGACUUUUGUGGAA | 1364 | 24555 | UUCCACAAAAGUCAACUCU | 3015 |
| 24555 | AAGGGCUACCACCUUAUGU | 1365 | 24555 | AAGGGCUACCACCUUAUGU | 1365 | 24573 | ACAUAAGGUGGUAGCCCUU | 3016 |
| 24573 | UCCUUCCCACAAGCAGCCC | 1366 | 24573 | UCCUUCCCACAAGCAGCCC | 1366 | 24591 | GGGCUGCUUGUGGGAAGGA | 3017 |
| 24591 | CCGCAUGGUGUUGUCUUCC | 1367 | 24591 | CCGCAUGGUGUUGUCUUCC | 1367 | 24609 | GGAAGACAACACCAUGCGG | 3018 |
| 24609 | CUACAUGUCACGUAUGUGC | 1368 | 24609 | CUACAUGUCACGUAUGUGC | 1368 | 24627 | GCACAUACGUGACAUGUAG | 3019 |
| 24627 | CCAUCCCAGGAGAGGAACU | 1369 | 24627 | CCAUCCCAGGAGAGGAACU | 1369 | 24645 | AGUUCCUCUCCUGGGAUGG | 3020 |
| 24645 | UUCACCACAGCGCCAGCAA | 1370 | 24645 | UUCACCACAGCGCCAGCAA | 1370 | 24663 | UUGCUGGCGCUGUGGUGAA | 3021 |
| 24663 | AUUUGUCAUGAAGGCAAAG | 1371 | 24663 | AUUUGUCAUGAAGGCAAAG | 1371 | 24681 | CUUUGCCUUCAUGACAAAU | 3022 |
| 24681 | GCAUACUUCCCUCGUGAAG | 1372 | 24681 | GCAUACUUCCCUCGUGAAG | 1372 | 24699 | CUUCACGAGGGAAGUAUGC | 3023 |
| 24699 | GGUGUUUUUGUGUUUAAUG | 1373 | 24699 | GGUGUUUUUGUGUUUAAUG | 1373 | 24717 | CAUUAAACACAAAAACACC | 3024 |
| 24717 | GGCACUUCUUGGUUUAUUA | 1374 | 24717 | GGCACUUCUUGGUUUAUUA | 1374 | 24735 | UAAUAAACCAAGAAGUGCC | 3025 |
| 24735 | ACACAGAGGAACUUCUUUU | 1375 | 24735 | ACACAGAGGAACUUCUUUU | 1375 | 24753 | AAAAGAAGUUCCUCUGUGU | 3026 |
| 24753 | UCUCCACAAAUAAUUACUA | 1376 | 24753 | UCUCCACAAAUAAUUACUA | 1376 | 24771 | UAGUAAUUAUUUGUGGAGA | 3027 |
| 24771 | ACAGACAAUACAUUUGUCU | 1377 | 24771 | ACAGACAAUACAUUUGUCU | 1377 | 24789 | AGACAAAUGUAUUGUCUGU | 3028 |
| 24789 | UCAGGAAAUUGUGAUGUCG | 1378 | 24789 | UCAGGAAAUUGUGAUGUCG | 1378 | 24807 | CGACAUCACAAUUUCCUGA | 3029 |
| 24807 | GUUAUUGGCAUCAUUAACA | 1379 | 24807 | GUUAUUGGCAUCAUUAACA | 1379 | 24825 | UGUUAAUGAUGCCAAUAAC | 3030 |
| 24825 | AACACAGUUUAUGAUCCUC | 1380 | 24825 | AACACAGUUUAUGAUCCUC | 1380 | 24843 | GAGGAUCAUAAACUGUGUU | 3031 |
| 24843 | CUGCAACCUGAGCUUGACU | 1381 | 24843 | CUGCAACCUGAGCUUGACU | 1381 | 24861 | AGUCAAGCUCAGGUUGCAG | 3032 |
| 24861 | UCAUUCAAAGAAGAGCUGG | 1382 | 24861 | UCAUUCAAAGAAGAGCUGG | 1382 | 24879 | CCAGCUCUUCUUUGAAUGA | 3033 |
| 24879 | GACAAGUACUUCAAAAAUC | 1383 | 24879 | GACAAGUACUUCAAAAAUC | 1383 | 24897 | GAUUUUUGAAGUACUUGUC | 3034 |
| 24897 | CAUACAUCACCAGAUGUUG | 1384 | 24897 | CAUACAUCACCAGAUGUUG | 1384 | 24915 | CAACAUCUGGUGAUGUAUG | 3035 |
| 24915 | GAUCUUGGCGACAUUUCAG | 1385 | 24915 | GAUCUUGGCGACAUUUCAG | 1385 | 24933 | CUGAAAUGUCGCCAAGAUC | 3036 |
| 24933 | GGCAUUAACGCUUCUGUCG | 1386 | 24933 | GGCAUUAACGCUUCUGUCG | 1386 | 24951 | CGACAGAAGCGUUAAUGCC | 3037 |
| 24951 | GUCAACAUUCAAAAAGAAA | 1387 | 24951 | GUCAACAUUCAAAAAGAAA | 1387 | 24969 | UUUCUUUUUGAAUGUUGAC | 3038 |
| 24969 | AUUGACCGCCUCAAUGAGG | 1388 | 24969 | AUUGACCGCCUCAAUGAGG | 1388 | 24987 | CCUCAUUGAGGCGGUCAAU | 3039 |
| 24987 | GUCGCUAAAAAUUUAAAUG | 1389 | 24987 | GUCGCUAAAAAUUUAAAUG | 1389 | 25005 | CAUUUAAAUUUUUAGCGAC | 3040 |
| 25005 | GAAUCACUCAUUGACCUUC | 1390 | 25005 | GAAUCACUCAUUGACCUUC | 1390 | 25023 | GAAGGUCAAUGAGUGAUUC | 3041 |
| 25023 | CAAGAAUUGGGAAAAUAUG | 1391 | 25023 | CAAGAAUUGGGAAAAUAUG | 1391 | 25041 | CAUAUUUUCCCAAUUCUUG | 3042 |
| 25041 | GAGCAAUAUAUUAAAUGGC | 1392 | 25041 | GAGCAAUAUAUUAAAUGGC | 1392 | 25059 | GCCAUUUAAUAUAUUGCUC | 3043 |
| 25059 | CCUUGGUAUGUUUGGCUCG | 1393 | 25059 | CCUUGGUAUGUUUGGCUCG | 1393 | 25077 | CGAGCCAAACAUACCAAGG | 3044 |
| 25077 | GGCUUCAUUGCUGGACUAA | 1394 | 25077 | GGCUUCAUUGCUGGACUAA | 1394 | 25095 | UUAGUCCAGCAAUGAAGCC | 3045 |
| 25095 | AUUGCCAUCGUCAUGGUUA | 1395 | 25095 | AUUGCCAUCGUCAUGGUUA | 1395 | 25113 | UAACCAUGACGAUGGCAAU | 3046 |
| 25113 | ACAAUCUUGCUUUGUUGCA | 1396 | 25113 | ACAAUCUUGCUUUGUUGCA | 1396 | 25131 | UGCAACAAAGCAAGAUUGU | 3047 |
| 25131 | AUGACUAGUUGUUGCAGUU | 1397 | 25131 | AUGACUAGUUGUUGCAGUU | 1397 | 25149 | AACUGCAACAACUAGUCAU | 3048 |
| 25149 | UGCCUCAAGGGUGCAUGCU | 1398 | 25149 | UGCCUCAAGGGUGCAUGCU | 1398 | 25167 | AGCAUGCACCCUUGAGGCA | 3049 |
| 25167 | UCUUGUGGUUCUUGCUGCA | 1399 | 25167 | UCUUGUGGUUCUUGCUGCA | 1399 | 25185 | UGCAGCAAGAACCACAAGA | 3050 |
| 25185 | AAGUUUGAUGAGGAUGACU | 1400 | 25185 | AAGUUUGAUGAGGAUGACU | 1400 | 25203 | AGUCAUCCUCAUCAAACUU | 3051 |
| 25203 | UCUGAGCCAGUUCUCAAGG | 1401 | 25203 | UCUGAGCCAGUUCUCAAGG | 1401 | 25221 | CCUUGAGAACUGGCUCAGA | 3052 |
| 25221 | GGUGUCAAAUUACAUUACA | 1402 | 25221 | GGUGUCAAAUUACAUUACA | 1402 | 25239 | UGUAAUGUAAUUUGACACC | 3053 |
| 25239 | ACAUAAACGAACUUAUGGA | 1403 | 25239 | ACAUAAACGAACUUAUGGA | 1403 | 25257 | UCCAUAAGUUCGUUUAUGU | 3054 |
| 25257 | AUUUGUUUAUGAGAUUUUU | 1404 | 25257 | AUUUGUUUAUGAGAUUUUU | 1404 | 25275 | AAAAAUCUCAUAAACAAAU | 3055 |
| 25275 | UUACUCUUGGAUCAAUUAC | 1405 | 25275 | UUACUCUUGGAUCAAUUAC | 1405 | 25293 | GUAAUUGAUCCAAGAGUAA | 3056 |
| 25293 | CUGCACAGCCAGUAAAAAU | 1406 | 25293 | CUGCACAGCCAGUAAAAAU | 1406 | 25311 | AUUUUUACUGGCUGUGCAG | 3057 |
| 25311 | UUGACAAUGCUUCUCCUGC | 1407 | 25311 | UUGACAAUGCUUCUCCUGC | 1407 | 25329 | GCAGGAGAAGCAUUGUCAA | 3058 |
| 25329 | CAAGUACUGUUCAUGCUAC | 1408 | 25329 | CAAGUACUGUUCAUGCUAC | 1408 | 25347 | GUAGCAUGAACAGUACUUG | 3059 |
| 25347 | CAGCAACGAUACCGCUACA | 1409 | 25347 | CAGCAACGAUACCGCUACA | 1409 | 25365 | UGUAGCGGUAUCGUUGCUG | 3060 |
| 25365 | AAGCCUCACUCCCUUUCGG | 1410 | 25365 | AAGCCUCACUCCCUUUCGG | 1410 | 25383 | CCGAAAGGGAGUGAGGCUU | 3061 |
| 25383 | GAUGGCUUGUUAUUGGCGU | 1411 | 25383 | GAUGGCUUGUUAUUGGCGU | 1411 | 25401 | ACGCCAAUAACAAGCCAUC | 3062 |
| 25401 | UUGCAUUUCUUGCUGUUUU | 1412 | 25401 | UUGCAUUUCUUGCUGUUUU | 1412 | 25419 | AAAACAGCAAGAAAUGCAA | 3063 |
| 25419 | UUCAGAGCGCUACCAAAAU | 1413 | 25419 | UUCAGAGCGCUACCAAAAU | 1413 | 25437 | AUUUUGGUAGCGCUCUGAA | 3064 |
| 25437 | UAAUUGCGCUCAAUAAAAG | 1414 | 25437 | UAAUUGCGCUCAAUAAAAG | 1414 | 25455 | CUUUUAUUGAGCGCAAUUA | 3065 |
| 25455 | GAUGGCAGCUAGCCCUUUA | 1415 | 25455 | GAUGGCAGCUAGCCCUUUA | 1415 | 25473 | UAAAGGGCUAGCUGCCAUC | 3066 |
| 25473 | AUAAGGGCUUCCAGUUCAU | 1416 | 25473 | AUAAGGGCUUCCAGUUCAU | 1416 | 25491 | AUGAACUGGAAGCCCUUAU | 3067 |
| 25491 | UUUGCAAUUUACUGCUGCU | 1417 | 25491 | UUUGCAAUUUACUGCUGCU | 1417 | 25509 | AGCAGCAGUAAAUUGCAAA | 3068 |
| 25509 | UAUUUGUUACCAUCUAUUC | 1418 | 25509 | UAUUUGUUACCAUCUAUUC | 1418 | 25527 | GAAUAGAUGGUAACAAAUA | 3069 |
| 25527 | CACAUCUUUUGCUUGUCGC | 1419 | 25527 | CACAUCUUUUGCUUGUCGC | 1419 | 25545 | GCGACAAGCAAAAGAUGUG | 3070 |
| 25545 | CUGCAGGUAUGGAGGCGCA | 1420 | 25545 | CUGCAGGUAUGGAGGCGCA | 1420 | 25563 | UGCGCCUCCAUACCUGCAG | 3071 |
| 25563 | AAUUUUUGUACCUCUAUGC | 1421 | 25563 | AAUUUUUGUACCUCUAUGC | 1421 | 25581 | GCAUAGAGGUACAAAAAUU | 3072 |
| 25581 | CCUUGAUAUAUUUUCUACA | 1422 | 25581 | CCUUGAUAUAUUUUCUACA | 1422 | 25599 | UGUAGAAAAUAUAUCAAGG | 3073 |
| 25599 | AAUGCAUCAACGCAUGUAG | 1423 | 25599 | AAUGCAUCAACGCAUGUAG | 1423 | 25617 | CUACAUGCGUUGAUGCAUU | 3074 |
| 25617 | GAAUUAUUAUGAGAUGUUG | 1424 | 25617 | GAAUUAUUAUGAGAUGUUG | 1424 | 25635 | CAACAUCUCAUAAUAAUUC | 3075 |
| 25635 | GGCUUUGUUGGAAGUGCAA | 1425 | 25635 | GGCUUUGUUGGAAGUGCAA | 1425 | 25653 | UUGCACUUCCAACAAAGCC | 3076 |
| 25653 | AAUCCAAGAACCCAUUACU | 1426 | 25653 | AAUCCAAGAACCCAUUACU | 1426 | 25671 | AGUAAUGGGUUCUUGGAUU | 3077 |
| 25671 | UUUAUGAUGCCAACUACUU | 1427 | 25671 | UUUAUGAUGCCAACUACUU | 1427 | 25689 | AAGUAGUUGGCAUCAUAAA | 3078 |
| 25689 | UUGUUUGCUGGCACACACA | 1428 | 25689 | UUGUUUGCUGGCACACACA | 1428 | 25707 | UGUGUGUGCCAGCAAACAA | 3079 |
| 25707 | AUAACUAUGACUACUGUAU | 1429 | 25707 | AUAACUAUGACUACUGUAU | 1429 | 25725 | AUACAGUAGUCAUAGUUAU | 3080 |
| 25725 | UACCAUAUAACAGUGUCAC | 1430 | 25725 | UACCAUAUAACAGUGUCAC | 1430 | 25743 | GUGACACUGUUAUAUGGUA | 3081 |
| 25743 | CAGAUACAAUUGUCGUUAC | 1431 | 25743 | CAGAUACAAUUGUCGUUAC | 1431 | 25761 | GUAACGACAAUUGUAUCUG | 3082 |
| 25761 | CUGAAGGUGACGGCAUUUC | 1432 | 25761 | CUGAAGGUGACGGCAUUUC | 1432 | 25779 | GAAAUGCCGUCACCUUCAG | 3083 |
| 25779 | CAACACCAAAACUCAAAGA | 1433 | 25779 | CAACACCAAAACUCAAAGA | 1433 | 25797 | UCUUUGAGUUUUGGUGUUG | 3084 |
| 25797 | AAGACUACCAAAUUGGUGG | 1434 | 25797 | AAGACUACCAAAUUGGUGG | 1434 | 25815 | CCACCAAUUUGGUAGUCUU | 3085 |
| 25815 | GUUAUUCUGAGGAUAGGCA | 1435 | 25815 | GUUAUUCUGAGGAUAGGCA | 1435 | 25833 | UGCCUAUCCUCAGAAUAAC | 3086 |
| 25833 | ACUCAGGUGUUAAAGACUA | 1436 | 25833 | ACUCAGGUGUUAAAGACUA | 1436 | 25851 | UAGUCUUUAACACCUGAGU | 3087 |
| 25851 | AUGUCGUUGUACAUGGCUA | 1437 | 25851 | AUGUCGUUGUACAUGGCUA | 1437 | 25869 | UAGCCAUGUACAACGACAU | 3088 |
| 25869 | AUUUCACCGAAGUUUACUA | 1438 | 25869 | AUUUCACCGAAGUUUACUA | 1438 | 25887 | UAGUAAACUUCGGUGAAAU | 3089 |
| 25887 | ACCAGCUUGAGUCUACACA | 1439 | 25887 | ACCAGCUUGAGUCUACACA | 1439 | 25905 | UGUGUAGACUCAAGCUGGU | 3090 |
| 25905 | AAAUUACUACAGACACUGG | 1440 | 25905 | AAAUUACUACAGACACUGG | 1440 | 25923 | CCAGUGUCUGUAGUAAUUU | 3091 |
| 25923 | GUAUUGAAAAUGCUACAUU | 1441 | 25923 | GUAUUGAAAAUGCUACAUU | 1441 | 25941 | AAUGUAGCAUUUUCAAUAC | 3092 |
| 25941 | UCUUCAUCUUUAACAAGCU | 1442 | 25941 | UCUUCAUCUUUAACAAGCU | 1442 | 25959 | AGCUUGUUAAAGAUGAAGA | 3093 |
| 25959 | UUGUUAAAGACCCACCGAA | 1443 | 25959 | UUGUUAAAGACCCACCGAA | 1443 | 25977 | UUCGGUGGGUCUUUAACAA | 3094 |
| 25977 | AUGUGCAAAUACACACAAU | 1444 | 25977 | AUGUGCAAAUACACACAAU | 1444 | 25995 | AUUGUGUGUAUUUGCACAU | 3095 |
| 25995 | UCGACGGCUCUUCAGGAGU | 1445 | 25995 | UCGACGGCUCUUCAGGAGU | 1445 | 26013 | ACUCCUGAAGAGCCGUCGA | 3096 |
| 26013 | UUGCUAAUCCAGCAAUGGA | 1446 | 26013 | UUGCUAAUCCAGCAAUGGA | 1446 | 26031 | UCCAUUGCUGGAUUAGCAA | 3097 |
| 26031 | AUCCAAUUUAUGAUGAGCC | 1447 | 26031 | AUCCAAUUUAUGAUGAGCC | 1447 | 26049 | GGCUCAUCAUAAAUUGGAU | 3098 |
| 26049 | CGACGACGACUACUAGCGU | 1448 | 26049 | CGACGACGACUACUAGCGU | 1448 | 26067 | ACGCUAGUAGUCGUCGUCG | 3099 |
| 26067 | UGCCUUUGUAAGCACAAGA | 1449 | 26067 | UGCCUUUGUAAGCACAAGA | 1449 | 26085 | UCUUGUGCUUACAAAGGCA | 3100 |
| 26085 | AAAGUGAGUACGAACUUAU | 1450 | 26085 | AAAGUGAGUACGAACUUAU | 1450 | 26103 | AUAAGUUCGUACUCACUUU | 3101 |
| 26103 | UGUACUCAUUCGUUUCGGA | 1451 | 26103 | UGUACUCAUUCGUUUCGGA | 1451 | 26121 | UCCGAAACGAAUGAGUACA | 3102 |
| 26121 | AAGAAACAGGUACGUUAAU | 1452 | 26121 | AAGAAACAGGUACGUUAAU | 1452 | 26139 | AUUAACGUACCUGUUUCUU | 3103 |
| 26139 | UAGUUAAUAGCGUACUUCU | 1453 | 26139 | UAGUUAAUAGCGUACUUCU | 1453 | 26157 | AGAAGUACGCUAUUAACUA | 3104 |
| 26157 | UUUUUCUUGCUUUCGUGGU | 1454 | 26157 | UUUUUCUUGCUUUCGUGGU | 1454 | 26175 | ACCACGAAAGCAAGAAAAA | 3105 |
| 26175 | UAUUCUUGCUAGUCACACU | 1455 | 26175 | UAUUCUUGCUAGUCACACU | 1455 | 26193 | AGUGUGACUAGCAAGAAUA | 3106 |
| 26193 | UAGCCAUCCUUACUGCGCU | 1456 | 26193 | UAGCCAUCCUUACUGCGCU | 1456 | 26211 | AGCGCAGUAAGGAUGGCUA | 3107 |
| 26211 | UUCGAUUGUGUGCGUACUG | 1457 | 26211 | UUCGAUUGUGUGCGUACUG | 1457 | 26229 | CAGUACGCACACAAUCGAA | 3108 |
| 26229 | GCUGCAAUAUUGUUAACGU | 1458 | 26229 | GCUGCAAUAUUGUUAACGU | 1458 | 26247 | ACGUUAACAAUAUUGCAGC | 3109 |
| 26247 | UGAGUUUAGUAAAACCAAC | 1459 | 26247 | UGAGUUUAGUAAAACCAAC | 1459 | 26265 | GUUGGUUUUACUAAACUCA | 3110 |
| 26265 | CGGUUUACGUCUACUCGCG | 1460 | 26265 | CGGUUUACGUCUACUCGCG | 1460 | 26283 | CGCGAGUAGACGUAAACCG | 3111 |
| 26283 | GUGUUAAAAAUCUGAACUC | 1461 | 26283 | GUGUUAAAAAUCUGAACUC | 1461 | 26301 | GAGUUCAGAUUUUUAACAC | 3112 |
| 26301 | CUUCUGAAGGAGUUCCUGA | 1462 | 26301 | CUUCUGAAGGAGUUCCUGA | 1462 | 26319 | UCAGGAACUCCUUCAGAAG | 3113 |
| 26319 | AUCUUCUGGUCUAAACGAA | 1463 | 26319 | AUCUUCUGGUCUAAACGAA | 1463 | 26337 | UUCGUUUAGACCAGAAGAU | 3114 |
| 26337 | ACUAACUAUUAUUAUUAUU | 1464 | 26337 | ACUAACUAUUAUUAUUAUU | 1464 | 26355 | AAUAAUAAUAAUAGUUAGU | 3115 |
| 26355 | UCUGUUUGGAACUUUAACA | 1465 | 26355 | UCUGUUUGGAACUUUAACA | 1465 | 26373 | UGUUAAAGUUCCAAACAGA | 3116 |
| 26373 | AUUGCUUAUCAUGGCAGAC | 1466 | 26373 | AUUGCUUAUCAUGGCAGAC | 1466 | 26391 | GUCUGCCAUGAUAAGCAAU | 3117 |
| 26391 | CAACGGUACUAUUACCGUU | 1467 | 26391 | CAACGGUACUAUUACCGUU | 1467 | 26409 | AACGGUAAUAGUACCGUUG | 3118 |
| 26409 | UGAGGAGCUUAAACAACUC | 1468 | 26409 | UGAGGAGCUUAAACAACUC | 1468 | 26427 | GAGUUGUUUAAGCUCCUCA | 3119 |
| 26427 | CCUGGAACAAUGGAACCUA | 1469 | 26427 | CCUGGAACAAUGGAACCUA | 1469 | 26445 | UAGGUUCCAUUGUUCCAGG | 3120 |
| 26445 | AGUAAUAGGUUUCCUAUUC | 1470 | 26445 | AGUAAUAGGUUUCCUAUUC | 1470 | 26463 | GAAUAGGAAACCUAUUACU | 3121 |
| 26463 | CCUAGCCUGGAUUAUGUUA | 1471 | 26463 | CCUAGCCUGGAUUAUGUUA | 1471 | 26481 | UAACAUAAUCCAGGCUAGG | 3122 |
| 26481 | ACUACAAUUUGCCUAUUCU | 1472 | 26481 | ACUACAAUUUGCCUAUUCU | 1472 | 26499 | AGAAUAGGCAAAUUGUAGU | 3123 |
| 26499 | UAAUCGGAACAGGUUUUUG | 1473 | 26499 | UAAUCGGAACAGGUUUUUG | 1473 | 26517 | CAAAAACCUGUUCCGAUUA | 3124 |
| 26517 | GUACAUAAUAAAGCUUGUU | 1474 | 26517 | GUACAUAAUAAAGCUUGUU | 1474 | 26535 | AACAAGCUUUAUUAUGUAC | 3125 |
| 26535 | UUUCCUCUGGCUCUUGUGG | 1475 | 26535 | UUUCCUCUGGCUCUUGUGG | 1475 | 26553 | CCACAAGAGCCAGAGGAAA | 3126 |
| 26553 | GCCAGUAACACUUGCUUGU | 1476 | 26553 | GCCAGUAACACUUGCUUGU | 1476 | 26571 | ACAAGCAAGUGUUACUGGC | 3127 |
| 26571 | UUUUGUGCUUGCUGCUGUC | 1477 | 26571 | UUUUGUGCUUGCUGCUGUC | 1477 | 26589 | GACAGCAGCAAGCACAAAA | 3128 |
| 26589 | CUACAGAAUUAAUUGGGUG | 1478 | 26589 | CUACAGAAUUAAUUGGGUG | 1478 | 26607 | CACCCAAUUAAUUCUGUAG | 3129 |
| 26607 | GACUGGCGGGAUUGCGAUU | 1479 | 26607 | GACUGGCGGGAUUGCGAUU | 1479 | 26625 | AAUCGCAAUCCCGCCAGUC | 3130 |
| 26625 | UGCAAUGGCUUGUAUUGUA | 1480 | 26625 | UGCAAUGGCUUGUAUUGUA | 1480 | 26643 | UACAAUACAAGCCAUUGCA | 3131 |
| 26643 | AGGCUUGAUGUGGCUUAGC | 1481 | 26643 | AGGCUUGAUGUGGCUUAGC | 1481 | 26661 | GCUAAGCCACAUCAAGCCU | 3132 |
| 26661 | CUACUUCGUUGCUUCCUUC | 1482 | 26661 | CUACUUCGUUGCUUCCUUC | 1482 | 26679 | GAAGGAAGCAACGAAGUAG | 3133 |
| 26679 | CAGGCUGUUUGCUCGUACC | 1483 | 26679 | CAGGCUGUUUGCUCGUACC | 1483 | 26697 | GGUACGAGCAAACAGCCUG | 3134 |
| 26697 | CCGCUCAAUGUGGUCAUUC | 1484 | 26697 | CCGCUCAAUGUGGUCAUUC | 1484 | 26715 | GAAUGACCACAUUGAGCGG | 3135 |
| 26715 | CAACCCAGAAACAAACAUU | 1485 | 26715 | CAACCCAGAAACAAACAUU | 1485 | 26733 | AAUGUUUGUUUCUGGGUUG | 3136 |
| 26733 | UCUUCUCAAUGUGCCUCUC | 1486 | 26733 | UCUUCUCAAUGUGCCUCUC | 1486 | 26751 | GAGAGGCACAUUGAGAAGA | 3137 |
| 26751 | CCGGGGGACAAUUGUGACC | 1487 | 26751 | CCGGGGGACAAUUGUGACC | 1487 | 26769 | GGUCACAAUUGUCCCCCGG | 3138 |
| 26769 | CAGACCGCUCAUGGAAAGU | 1488 | 26769 | CAGACCGCUCAUGGAAAGU | 1488 | 26787 | ACUUUCCAUGAGCGGUCUG | 3139 |
| 26787 | UGAACUUGUCAUUGGUGCU | 1489 | 26787 | UGAACUUGUCAUUGGUGCU | 1489 | 26805 | AGCACCAAUGACAAGUUCA | 3140 |
| 26805 | UGUGAUCAUUCGUGGUCAC | 1490 | 26805 | UGUGAUCAUUCGUGGUCAC | 1490 | 26823 | GUGACCACGAAUGAUCACA | 3141 |
| 26823 | CUUGCGAAUGGCCGGACAC | 1491 | 26823 | CUUGCGAAUGGCCGGACAC | 1491 | 26841 | GUGUCCGGCCAUUCGCAAG | 3142 |
| 26841 | CUCCCUAGGGCGCUGUGAC | 1492 | 26841 | CUCCCUAGGGCGCUGUGAC | 1492 | 26859 | GUCACAGCGCCCUAGGGAG | 3143 |
| 26859 | CAUUAAGGACCUGCCAAAA | 1493 | 26859 | CAUUAAGGACCUGCCAAAA | 1493 | 26877 | UUUUGGCAGGUCCUUAAUG | 3144 |
| 26877 | AGAGAUCACUGUGGCUACA | 1494 | 26877 | AGAGAUCACUGUGGCUACA | 1494 | 26895 | UGUAGCCACAGUGAUCUCU | 3145 |
| 26895 | AUCACGAACGCUUUCUUAU | 1495 | 26895 | AUCACGAACGCUUUCUUAU | 1495 | 26913 | AUAAGAAAGCGUUCGUGAU | 3146 |
| 26913 | UUACAAAUUAGGAGCGUCG | 1496 | 26913 | UUACAAAUUAGGAGCGUCG | 1496 | 26931 | CGACGCUCCUAAUUUGUAA | 3147 |
| 26931 | GCAGCGUGUAGGCACUGAU | 1497 | 26931 | GCAGCGUGUAGGCACUGAU | 1497 | 26949 | AUCAGUGCCUACACGCUGC | 3148 |
| 26949 | UUCAGGUUUUGCUGCAUAC | 1498 | 26949 | UUCAGGUUUUGCUGCAUAC | 1498 | 26967 | GUAUGCAGCAAAACCUGAA | 3149 |
| 26967 | CAACCGCUACCGUAUUGGA | 1499 | 26967 | CAACCGCUACCGUAUUGGA | 1499 | 26985 | UCCAAUACGGUAGCGGUUG | 3150 |
| 26985 | AAACUAUAAAUUAAAUACA | 1500 | 26985 | AAACUAUAAAUUAAAUACA | 1500 | 27003 | UGUAUUUAAUUUAUAGUUU | 3151 |
| 27003 | AGACCACGCCGGUAGCAAC | 1501 | 27003 | AGACCACGCCGGUAGCAAC | 1501 | 27021 | GUUGCUACCGGCGUGGUCU | 3152 |
| 27021 | CGACAAUAUUGCUUUGCUA | 1502 | 27021 | CGACAAUAUUGCUUUGCUA | 1502 | 27039 | UAGCAAAGCAAUAUUGUCG | 3153 |
| 27039 | AGUACAGUAAGUGACAACA | 1503 | 27039 | AGUACAGUAAGUGACAACA | 1503 | 27057 | UGUUGUCACUUACUGUACU | 3154 |
| 27057 | AGAUGUUUCAUCUUGUUGA | 1504 | 27057 | AGAUGUUUCAUCUUGUUGA | 1504 | 27075 | UCAACAAGAUGAAACAUCU | 3155 |
| 27075 | ACUUCCAGGUUACAAUAGC | 1505 | 27075 | ACUUCCAGGUUACAAUAGC | 1505 | 27093 | GCUAUUGUAACCUGGAAGU | 3156 |
| 27093 | CAGAGAUAUUGAUUAUCAU | 1506 | 27093 | CAGAGAUAUUGAUUAUCAU | 1506 | 27111 | AUGAUAAUCAAUAUCUCUG | 3157 |
| 27111 | UUAUGAGGACUUUCAGGAU | 1507 | 27111 | UUAUGAGGACUUUCAGGAU | 1507 | 27129 | AUCCUGAAAGUCCUCAUAA | 3158 |
| 27129 | UUGCUAUUUGGAAUCUUGA | 1508 | 27129 | UUGCUAUUUGGAAUCUUGA | 1508 | 27147 | UCAAGAUUCCAAAUAGCAA | 3159 |
| 27147 | ACGUUAUAAUAAGUUCAAU | 1509 | 27147 | ACGUUAUAAUAAGUUCAAU | 1509 | 27165 | AUUGAACUUAUUAUAACGU | 3160 |
| 27165 | UAGUGAGACAAUUAUUUAA | 1510 | 27165 | UAGUGAGACAAUUAUUUAA | 1510 | 27183 | UUAAAUAAUUGUCUCACUA | 3161 |
| 27183 | AGCCUCUAACUAAGAAGAA | 1511 | 27183 | AGCCUCUAACUAAGAAGAA | 1511 | 27201 | UUCUUCUUAGUUAGAGGCU | 3162 |
| 27201 | AUUAUUCGGAGUUAGAUGA | 1512 | 27201 | AUUAUUCGGAGUUAGAUGA | 1512 | 27219 | UCAUCUAACUCCGAAUAAU | 3163 |
| 27219 | AUGAAGAACCUAUGGAGUU | 1513 | 27219 | AUGAAGAACCUAUGGAGUU | 1513 | 27237 | AACUCCAUAGGUUCUUCAU | 3164 |
| 27237 | UAGAUUAUCCAUAAAACGA | 1514 | 27237 | UAGAUUAUCCAUAAAACGA | 1514 | 27255 | UCGUUUUAUGGAUAAUCUA | 3165 |
| 27255 | AACAUGAAAAUUAUUCUCU | 1515 | 27255 | AACAUGAAAAUUAUUCUCU | 1515 | 27273 | AGAGAAUAAUUUUCAUGUU | 3166 |
| 27273 | UUCCUGACAUUGAUUGUAU | 1516 | 27273 | UUCCUGACAUUGAUUGUAU | 1516 | 27291 | AUACAAUCAAUGUCAGGAA | 3167 |
| 27291 | UUUACAUCUUGCGAGCUAU | 1517 | 27291 | UUUACAUCUUGCGAGCUAU | 1517 | 27309 | AUAGCUCGCAAGAUGUAAA | 3168 |
| 27309 | UAUCACUAUCAGGAGUGUG | 1518 | 27309 | UAUCACUAUCAGGAGUGUG | 1518 | 27327 | CACACUCCUGAUAGUGAUA | 3169 |
| 27327 | GUUAGAGGUACGACUGUAC | 1519 | 27327 | GUUAGAGGUACGACUGUAC | 1519 | 27345 | GUACAGUCGUACCUCUAAC | 3170 |
| 27345 | CUACUAAAAGAACCUUGCC | 1520 | 27345 | CUACUAAAAGAACCUUGCC | 1520 | 27363 | GGCAAGGUUCUUUUAGUAG | 3171 |
| 27363 | CCAUCAGGAACAUACGAGG | 1521 | 27363 | CCAUCAGGAACAUACGAGG | 1521 | 27381 | CCUCGUAUGUUCCUGAUGG | 3172 |
| 27381 | GGCAAUUCACCAUUUCACC | 1522 | 27381 | GGCAAUUCACCAUUUCACC | 1522 | 27399 | GGUGAAAUGGUGAAUUGCC | 3173 |
| 27399 | CCUCUUGCUGACAAUAAAU | 1523 | 27399 | CCUCUUGCUGACAAUAAAU | 1523 | 27417 | AUUUAUUGUCAGCAAGAGG | 3174 |
| 27417 | UUUGCACUAACUUGCACUA | 1524 | 27417 | UUUGCACUAACUUGCACUA | 1524 | 27435 | UAGUGCAAGUUAGUGCAAA | 3175 |
| 27435 | AGCACACACUUUGCUUUUG | 1525 | 27435 | AGCACACACUUUGCUUUUG | 1525 | 27453 | CAAAAGCAAAGUGUGUGCU | 3176 |
| 27453 | GCUUGUGCUGACGGUACUC | 1526 | 27453 | GCUUGUGCUGACGGUACUC | 1526 | 27471 | GAGUACCGUCAGCACAAGC | 3177 |
| 27471 | CGACAUACCUAUCAGCUGC | 1527 | 27471 | CGACAUACCUAUCAGCUGC | 1527 | 27489 | GCAGCUGAUAGGUAUGUCG | 3178 |
| 27489 | CGUGCAAGAUCAGUUUCAC | 1528 | 27489 | CGUGCAAGAUCAGUUUCAC | 1528 | 27507 | GUGAAACUGAUCUUGCACG | 3179 |
| 27507 | CCAAAACUUUUCAUCAGAC | 1529 | 27507 | CCAAAACUUUUCAUCAGAC | 1529 | 27525 | GUCUGAUGAAAAGUUUUGG | 3180 |
| 27525 | CAAGAGGAGGUUCAACAAG | 1530 | 27525 | CAAGAGGAGGUUCAACAAG | 1530 | 27543 | CUUGUUGAACCUCCUCUUG | 3181 |
| 27543 | GAGCUCUACUCGCCACUUU | 1531 | 27543 | GAGCUCUACUCGCCACUUU | 1531 | 27561 | AAAGUGGCGAGUAGAGCUC | 3182 |
| 27561 | UUUCUCAUUGUUGCUGCUC | 1532 | 27561 | UUUCUCAUUGUUGCUGCUC | 1532 | 27579 | GAGCAGCAACAAUGAGAAA | 3183 |
| 27579 | CUAGUAUUUUUAAUACUUU | 1533 | 27579 | CUAGUAUUUUUAAUACUUU | 1533 | 27597 | AAAGUAUUAAAAAUACUAG | 3184 |
| 27597 | UGCUUCACCAUUAAGAGAA | 1534 | 27597 | UGCUUCACCAUUAAGAGAA | 1534 | 27615 | UUCUCUUAAUGGUGAAGCA | 3185 |
| 27615 | AAGACAGAAUGAAUGAGCU | 1535 | 27615 | AAGACAGAAUGAAUGAGCU | 1535 | 27633 | AGCUCAUUCAUUCUGUCUU | 3186 |
| 27633 | UCACUUUAAUUGACUUCUA | 1536 | 27633 | UCACUUUAAUUGACUUCUA | 1536 | 27651 | UAGAAGUCAAUUAAAGUGA | 3187 |
| 27651 | AUUUGUGCUUUUUAGCCUU | 1537 | 27651 | AUUUGUGCUUUUUAGCCUU | 1537 | 27669 | AAGGCUAAAAAGCACAAAU | 3188 |
| 27669 | UUCUGCUAUUCCUUGUUUU | 1538 | 27669 | UUCUGCUAUUCCUUGUUUU | 1538 | 27687 | AAAACAAGGAAUAGCAGAA | 3189 |
| 27687 | UAAUAAUGCUUAUUAUAUU | 1539 | 27687 | UAAUAAUGCUUAUUAUAUU | 1539 | 27705 | AAUAUAAUAAGCAUUAUUA | 3190 |
| 27705 | UUUGGUUUUCACUCGAAAU | 1540 | 27705 | UUUGGUUUUCACUCGAAAU | 1540 | 27723 | AUUUCGAGUGAAAACCAAA | 3191 |
| 27723 | UCCAGGAUCUAGAAGAACC | 1541 | 27723 | UCCAGGAUCUAGAAGAACC | 1541 | 27741 | GGUUCUUCUAGAUCCUGGA | 3192 |
| 27741 | CUUGUACCAAAGUCUAAAC | 1542 | 27741 | CUUGUACCAAAGUCUAAAC | 1542 | 27759 | GUUUAGACUUUGGUACAAG | 3193 |
| 27759 | CGAACAUGAAACUUCUCAU | 1543 | 27759 | CGAACAUGAAACUUCUCAU | 1543 | 27777 | AUGAGAAGUUUCAUGUUCG | 3194 |
| 27777 | UUGUUUUGACUUGUAUUUC | 1544 | 27777 | UUGUUUUGACUUGUAUUUC | 1544 | 27795 | GAAAUACAAGUCAAAACAA | 3195 |
| 27795 | CUCUAUGCAGUUGCAUAUG | 1545 | 27795 | CUCUAUGCAGUUGCAUAUG | 1545 | 27813 | CAUAUGCAACUGCAUAGAG | 3196 |
| 27813 | GCACUGUAGUACAGCGCUG | 1546 | 27813 | GCACUGUAGUACAGCGCUG | 1546 | 27831 | CAGCGCUGUACUACAGUGC | 3197 |
| 27831 | GUGCAUCUAAUAAACCUCA | 1547 | 27831 | GUGCAUCUAAUAAACCUCA | 1547 | 27849 | UGAGGUUUAUUAGAUGCAC | 3198 |
| 27849 | AUGUGCUUGAAGAUCCUUG | 1548 | 27849 | AUGUGCUUGAAGAUCCUUG | 1548 | 27867 | CAAGGAUCUUCAAGCACAU | 3199 |
| 27867 | GUAAGGUACAACACUAGGG | 1549 | 27867 | GUAAGGUACAACACUAGGG | 1549 | 27885 | CCCUAGUGUUGUACCUUAC | 3200 |
| 27885 | GGUAAUACUUAUAGCACUG | 1550 | 27885 | GGUAAUACUUAUAGCACUG | 1550 | 27903 | CAGUGCUAUAAGUAUUACC | 3201 |
| 27903 | GCUUGGCUUUGUGCUCUAG | 1551 | 27903 | GCUUGGCUUUGUGCUCUAG | 1551 | 27921 | CUAGAGCACAAAGCCAAGC | 3202 |
| 27921 | GGAAAGGUUUUACCUUUUC | 1552 | 27921 | GGAAAGGUUUUACCUUUUC | 1552 | 27939 | GAAAAGGUAAAACCUUUCC | 3203 |
| 27939 | CAUAGAUGGCACACUAUGG | 1553 | 27939 | CAUAGAUGGCACACUAUGG | 1553 | 27957 | CCAUAGUGUGCCAUCUAUG | 3204 |
| 27957 | GUUCAAACAUGCACACCUA | 1554 | 27957 | GUUCAAACAUGCACACCUA | 1554 | 27975 | UAGGUGUGCAUGUUUGAAC | 3205 |
| 27975 | AAUGUUACUAUCAACUGUC | 1555 | 27975 | AAUGUUACUAUCAACUGUC | 1555 | 27993 | GACAGUUGAUAGUAACAUU | 3206 |
| 27993 | CAAGAUCCAGCUGGUGGUG | 1556 | 27993 | CAAGAUCCAGCUGGUGGUG | 1556 | 28011 | CACCACCAGCUGGAUCUUG | 3207 |
| 28011 | GCGCUUAUAGCUAGGUGUU | 1557 | 28011 | GCGCUUAUAGCUAGGUGUU | 1557 | 28029 | AACACCUAGCUAUAAGCGC | 3208 |
| 28029 | UGGUACCUUCAUGAAGGUC | 1558 | 28029 | UGGUACCUUCAUGAAGGUC | 1558 | 28047 | GACCUUCAUGAAGGUACCA | 3209 |
| 28047 | CACCAAACUGCUGCAUUUA | 1559 | 28047 | CACCAAACUGCUGCAUUUA | 1559 | 28065 | UAAAUGCAGCAGUUUGGUG | 3210 |
| 28065 | AGAGACGUACUUGUUGUUU | 1560 | 28065 | AGAGACGUACUUGUUGUUU | 1560 | 28083 | AAACAACAAGUACGUCUCU | 3211 |
| 28083 | UUAAAUAAACGAACAAAUU | 1561 | 28083 | UUAAAUAAACGAACAAAUU | 1561 | 28101 | AAUUUGUUCGUUUAUUUAA | 3212 |
| 28101 | UAAAAUGUCUGAUAAUGGA | 1562 | 28101 | UAAAAUGUCUGAUAAUGGA | 1562 | 28119 | UCCAUUAUCAGACAUUUUA | 3213 |
| 28119 | ACCCCAAUCAAACCAACGU | 1563 | 28119 | ACCCCAAUCAAACCAACGU | 1563 | 28137 | ACGUUGGUUUGAUUGGGGU | 3214 |
| 28137 | UAGUGCCCCCCGCAUUACA | 1564 | 28137 | UAGUGCCCCCCGCAUUACA | 1564 | 28155 | UGUAAUGCGGGGGGCACUA | 3215 |
| 28155 | AUUUGGUGGACCCACAGAU | 1565 | 28155 | AUUUGGUGGACCCACAGAU | 1565 | 28173 | AUCUGUGGGUCCACCAAAU | 3216 |
| 28173 | UUCAACUGACAAUAACCAG | 1566 | 28173 | UUCAACUGACAAUAACCAG | 1566 | 28191 | CUGGUUAUUGUCAGUUGAA | 3217 |
| 28191 | GAAUGGAGGACGCAAUGGG | 1567 | 28191 | GAAUGGAGGACGCAAUGGG | 1567 | 28209 | CCCAUUGCGUCCUCCAUUC | 3218 |
| 28209 | GGCAAGGCCAAAACAGCGC | 1568 | 28209 | GGCAAGGCCAAAACAGCGC | 1568 | 28227 | GCGCUGUUUUGGCCUUGCC | 3219 |
| 28227 | CCGACCCCAAGGUUUACCC | 1569 | 28227 | CCGACCCCAAGGUUUACCC | 1569 | 28245 | GGGUAAACCUUGGGGUCGG | 3220 |
| 28245 | CAAUAAUACUGCGUCUUGG | 1570 | 28245 | CAAUAAUACUGCGUCUUGG | 1570 | 28263 | CCAAGACGCAGUAUUAUUG | 3221 |
| 28263 | GUUCACAGCUCUCACUCAG | 1571 | 28263 | GUUCACAGCUCUCACUCAG | 1571 | 28281 | CUGAGUGAGAGCUGUGAAC | 3222 |
| 28281 | GCAUGGCAAGGAGGAACUU | 1572 | 28281 | GCAUGGCAAGGAGGAACUU | 1572 | 28299 | AAGUUCCUCCUUGCCAUGC | 3223 |
| 28299 | UAGAUUCCCUCGAGGCCAG | 1573 | 28299 | UAGAUUCCCUCGAGGCCAG | 1573 | 28317 | CUGGCCUCGAGGGAAUCUA | 3224 |
| 28317 | GGGCGUUCCAAUCAACACC | 1574 | 28317 | GGGCGUUCCAAUCAACACC | 1574 | 28335 | GGUGUUGAUUGGAACGCCC | 3225 |
| 28335 | CAAUAGUGGUCCAGAUGAC | 1575 | 28335 | CAAUAGUGGUCCAGAUGAC | 1575 | 28353 | GUCAUCUGGACCACUAUUG | 3226 |
| 28353 | CCAAAUUGGCUACUACCGA | 1576 | 28353 | CCAAAUUGGCUACUACCGA | 1576 | 28371 | UCGGUAGUAGCCAAUUUGG | 3227 |
| 28371 | AAGAGCUACCCGACGAGUU | 1577 | 28371 | AAGAGCUACCCGACGAGUU | 1577 | 28389 | AACUCGUCGGGUAGCUCUU | 3228 |
| 28389 | UCGUGGUGGUGACGGCAAA | 1578 | 28389 | UCGUGGUGGUGACGGCAAA | 1578 | 28407 | UUUGCCGUCACCACCACGA | 3229 |
| 28407 | AAUGAAAGAGCUCAGCCCC | 1579 | 28407 | AAUGAAAGAGCUCAGCCCC | 1579 | 28425 | GGGGCUGAGCUCUUUCAUU | 3230 |
| 28425 | CAGAUGGUACUUCUAUUAC | 1580 | 28425 | CAGAUGGUACUUCUAUUAC | 1580 | 28443 | GUAAUAGAAGUACCAUCUG | 3231 |
| 28443 | CCUAGGAACUGGCCCAGAA | 1581 | 28443 | CCUAGGAACUGGCCCAGAA | 1581 | 28461 | UUCUGGGCCAGUUCCUAGG | 3232 |
| 28461 | AGCUUCACUUCCCUACGGC | 1582 | 28461 | AGCUUCACUUCCCUACGGC | 1582 | 28479 | GCCGUAGGGAAGUGAAGCU | 3233 |
| 28479 | CGCUAACAAAGAAGGCAUC | 1583 | 28479 | CGCUAACAAAGAAGGCAUC | 1583 | 28497 | GAUGCCUUCUUUGUUAGCG | 3234 |
| 28497 | CGUAUGGGUUGCAACUGAG | 1584 | 28497 | CGUAUGGGUUGCAACUGAG | 1584 | 28515 | CUCAGUUGCAACCCAUACG | 3235 |
| 28515 | GGGAGCCUUGAAUACACCC | 1585 | 28515 | GGGAGCCUUGAAUACACCC | 1585 | 28533 | GGGUGUAUUCAAGGCUCCC | 3236 |
| 28533 | CAAAGACCACAUUGGCACC | 1586 | 28533 | CAAAGACCACAUUGGCACC | 1586 | 28551 | GGUGCCAAUGUGGUCUUUG | 3237 |
| 28551 | CCGCAAUCCUAAUAACAAU | 1587 | 28551 | CCGCAAUCCUAAUAACAAU | 1587 | 28569 | AUUGUUAUUAGGAUUGCGG | 3238 |
| 28569 | UGCUGCCACCGUGCUACAA | 1588 | 28569 | UGCUGCCACCGUGCUACAA | 1588 | 28587 | UUGUAGCACGGUGGCAGCA | 3239 |
| 28587 | ACUUCCUCAAGGAACAACA | 1589 | 28587 | ACUUCCUCAAGGAACAACA | 1589 | 28605 | UGUUGUUCCUUGAGGAAGU | 3240 |
| 28605 | AUUGCCAAAAGGCUUCUAC | 1590 | 28605 | AUUGCCAAAAGGCUUCUAC | 1590 | 28623 | GUAGAAGCCUUUUGGCAAU | 3241 |
| 28623 | CGCAGAGGGAAGCAGAGGC | 1591 | 28623 | CGCAGAGGGAAGCAGAGGC | 1591 | 28641 | GCCUCUGCUUCCCUCUGCG | 3242 |
| 28641 | CGGCAGUCAAGCCUCUUCU | 1592 | 28641 | CGGCAGUCAAGCCUCUUCU | 1592 | 28659 | AGAAGAGGCUUGACUGCCG | 3243 |
| 28659 | UCGCUCCUCAUCACGUAGU | 1593 | 28659 | UCGCUCCUCAUCACGUAGU | 1593 | 28677 | ACUACGUGAUGAGGAGCGA | 3244 |
| 28677 | UCGCGGUAAUUCAAGAAAU | 1594 | 28677 | UCGCGGUAAUUCAAGAAAU | 1594 | 28695 | AUUUCUUGAAUUACCGCGA | 3245 |
| 28695 | UUCAACUCCUGGCAGCAGU | 1595 | 28695 | UUCAACUCCUGGCAGCAGU | 1595 | 28713 | ACUGCUGCCAGGAGUUGAA | 3246 |
| 28713 | UAGGGGAAAUUCUCCUGCU | 1596 | 28713 | UAGGGGAAAUUCUCCUGCU | 1596 | 28731 | AGCAGGAGAAUUUCCCCUA | 3247 |
| 28731 | UCGAAUGGCUAGCGGAGGU | 1597 | 28731 | UCGAAUGGCUAGCGGAGGU | 1597 | 28749 | ACCUCCGCUAGCCAUUCGA | 3248 |
| 28749 | UGGUGAAACUGCCCUCGCG | 1598 | 28749 | UGGUGAAACUGCCCUCGCG | 1598 | 28767 | CGCGAGGGCAGUUUCACCA | 3249 |
| 28767 | GCUAUUGCUGCUAGACAGA | 1599 | 28767 | GCUAUUGCUGCUAGACAGA | 1599 | 28785 | UCUGUCUAGCAGCAAUAGC | 3250 |
| 28785 | AUUGAACCAGCUUGAGAGC | 1600 | 28785 | AUUGAACCAGCUUGAGAGC | 1600 | 28803 | GCUCUCAAGCUGGUUCAAU | 3251 |
| 28803 | CAAAGUUUCUGGUAAAGGC | 1601 | 28803 | CAAAGUUUCUGGUAAAGGC | 1601 | 28821 | GCCUUUACCAGAAACUUUG | 3252 |
| 28821 | CCAACAACAACAAGGCCAA | 1602 | 28821 | CCAACAACAACAAGGCCAA | 1602 | 28839 | UUGGCCUUGUUGUUGUUGG | 3253 |
| 28839 | AACUGUCACUAAGAAAUCU | 1603 | 28839 | AACUGUCACUAAGAAAUCU | 1603 | 28857 | AGAUUUCUUAGUGACAGUU | 3254 |
| 28857 | UGCUGCUGAGGCAUCUAAA | 1604 | 28857 | UGCUGCUGAGGCAUCUAAA | 1604 | 28875 | UUUAGAUGCCUCAGCAGCA | 3255 |
| 28875 | AAAGCCUCGCCAAAAACGU | 1605 | 28875 | AAAGCCUCGCCAAAAACGU | 1605 | 28893 | ACGUUUUUGGCGAGGCUUU | 3256 |
| 28893 | UACUGCCACAAAACAGUAC | 1606 | 28893 | UACUGCCACAAAACAGUAC | 1606 | 28911 | GUACUGUUUUGUGGCAGUA | 3257 |
| 28911 | CAACGUCACUCAAGCAUUU | 1607 | 28911 | CAACGUCACUCAAGCAUUU | 1607 | 28929 | AAAUGCUUGAGUGACGUUG | 3258 |
| 28929 | UGGGAGACGUGGUCCAGAA | 1608 | 28929 | UGGGAGACGUGGUCCAGAA | 1608 | 28947 | UUCUGGACCACGUCUCCCA | 3259 |
| 28947 | ACAAACCCAAGGAAAUUUC | 1609 | 28947 | ACAAACCCAAGGAAAUUUC | 1609 | 28965 | GAAAUUUCCUUGGGUUUGU | 3260 |
| 28965 | CGGGGACCAAGACCUAAUC | 1610 | 28965 | CGGGGACCAAGACCUAAUC | 1610 | 28983 | GAUUAGGUCUUGGUCCCCG | 3261 |
| 28983 | CAGACAAGGAACUGAUUAC | 1611 | 28983 | CAGACAAGGAACUGAUUAC | 1611 | 29001 | GUAAUCAGUUCCUUGUCUG | 3262 |
| 29001 | CAAACAUUGGCCGCAAAUU | 1612 | 29001 | CAAACAUUGGCCGCAAAUU | 1612 | 29019 | AAUUUGCGGCCAAUGUUUG | 3263 |
| 29019 | UGCACAAUUUGCUCCAAGU | 1613 | 29019 | UGCACAAUUUGCUCCAAGU | 1613 | 29037 | ACUUGGAGCAAAUUGUGCA | 3264 |
| 29037 | UGCCUCUGCAUUCUUUGGA | 1614 | 29037 | UGCCUCUGCAUUCUUUGGA | 1614 | 29055 | UCCAAAGAAUGCAGAGGCA | 3265 |
| 29055 | AAUGUCACGCAUUGGCAUG | 1615 | 29055 | AAUGUCACGCAUUGGCAUG | 1615 | 29073 | CAUGCCAAUGCGUGACAUU | 3266 |
| 29073 | GGAAGUCACACCUUCGGGA | 1616 | 29073 | GGAAGUCACACCUUCGGGA | 1616 | 29091 | UCCCGAAGGUGUGACUUCC | 3267 |
| 29091 | AACAUGGCUGACUUAUCAU | 1617 | 29091 | AACAUGGCUGACUUAUCAU | 1617 | 29109 | AUGAUAAGUCAGCCAUGUU | 3268 |
| 29109 | UGGAGCCAUUAAAUUGGAU | 1618 | 29109 | UGGAGCCAUUAAAUUGGAU | 1618 | 29127 | AUCCAAUUUAAUGGCUCCA | 3269 |
| 29127 | UGACAAAGAUCCACAAUUC | 1619 | 29127 | UGACAAAGAUCCACAAUUC | 1619 | 29145 | GAAUUGUGGAUCUUUGUCA | 3270 |
| 29145 | CAAAGACAACGUCAUACUG | 1620 | 29145 | CAAAGACAACGUCAUACUG | 1620 | 29163 | CAGUAUGACGUUGUCUUUG | 3271 |
| 29163 | GCUGAACAAGCACAUUGAC | 1621 | 29163 | GCUGAACAAGCACAUUGAC | 1621 | 29181 | GUCAAUGUGCUUGUUCAGC | 3272 |
| 29181 | CGCAUACAAAACAUUCCCA | 1622 | 29181 | CGCAUACAAAACAUUCCCA | 1622 | 29199 | UGGGAAUGUUUUGUAUGCG | 3273 |
| 29199 | ACCAACAGAGCCUAAAAAG | 1623 | 29199 | ACCAACAGAGCCUAAAAAG | 1623 | 29217 | CUUUUUAGGCUCUGUUGGU | 3274 |
| 29217 | GGACAAAAAGAAAAAGACU | 1624 | 29217 | GGACAAAAAGAAAAAGACU | 1624 | 29235 | AGUCUUUUUCUUUUUGUCC | 3275 |
| 29235 | UGAUGAAGCUCAGCCUUUG | 1625 | 29235 | UGAUGAAGCUCAGCCUUUG | 1625 | 29253 | CAAAGGCUGAGCUUCAUCA | 3276 |
| 29253 | GCCGCAGAGACAAAAGAAG | 1626 | 29253 | GCCGCAGAGACAAAAGAAG | 1626 | 29271 | CUUCUUUUGUCUCUGCGGC | 3277 |
| 29271 | GCAGCCCACUGUGACUCUU | 1627 | 29271 | GCAGCCCACUGUGACUCUU | 1627 | 29289 | AAGAGUCACAGUGGGCUGC | 3278 |
| 29289 | UCUUCCUGCGGCUGACAUG | 1628 | 29289 | UCUUCCUGCGGCUGACAUG | 1628 | 29307 | CAUGUCAGCCGCAGGAAGA | 3279 |
| 29307 | GGAUGAUUUCUCCAGACAA | 1629 | 29307 | GGAUGAUUUCUCCAGACAA | 1629 | 29325 | UUGUCUGGAGAAAUCAUCC | 3280 |
| 29325 | ACUUCAAAAUUCCAUGAGU | 1630 | 29325 | ACUUCAAAAUUCCAUGAGU | 1630 | 29343 | ACUCAUGGAAUUUUGAAGU | 3281 |
| 29343 | UGGAGCUUCUGCUGAUUCA | 1631 | 29343 | UGGAGCUUCUGCUGAUUCA | 1631 | 29361 | UGAAUCAGCAGAAGCUCCA | 3282 |
| 29361 | AACUCAGGCAUAAACACUC | 1632 | 29361 | AACUCAGGCAUAAACACUC | 1632 | 29379 | GAGUGUUUAUGCCUGAGUU | 3283 |
| 29379 | CAUGAUGACCACACAAGGC | 1633 | 29379 | CAUGAUGACCACACAAGGC | 1633 | 29397 | GCCUUGUGUGGUCAUCAUG | 3284 |
| 29397 | CAGAUGGGCUAUGUAAACG | 1634 | 29397 | CAGAUGGGCUAUGUAAACG | 1634 | 29415 | CGUUUACAUAGCCCAUCUG | 3285 |
| 29415 | GUUUUCGCAAUUCCGUUUA | 1635 | 29415 | GUUUUCGCAAUUCCGUUUA | 1635 | 29433 | UAAACGGAAUUGCGAAAAC | 3286 |
| 29433 | ACGAUACAUAGUCUACUCU | 1636 | 29433 | ACGAUACAUAGUCUACUCU | 1636 | 29451 | AGAGUAGACUAUGUAUCGU | 3287 |
| 29451 | UUGUGCAGAAUGAAUUCUC | 1637 | 29451 | UUGUGCAGAAUGAAUUCUC | 1637 | 29469 | GAGAAUUCAUUCUGCACAA | 3288 |
| 29469 | CGUAACUAAACAGCACAAG | 1638 | 29469 | CGUAACUAAACAGCACAAG | 1638 | 29487 | CUUGUGCUGUUUAGUUACG | 3289 |
| 29487 | GUAGGUUUAGUUAACUUUA | 1639 | 29487 | GUAGGUUUAGUUAACUUUA | 1639 | 29505 | UAAAGUUAACUAAACCUAC | 3290 |
| 29505 | AAUCUCACAUAGCAAUCUU | 1640 | 29505 | AAUCUCACAUAGCAAUCUU | 1640 | 29523 | AAGAUUGCUAUGUGAGAUU | 3291 |
| 29523 | UUAAUCAAUGUGUAACAUU | 1641 | 29523 | UUAAUCAAUGUGUAACAUU | 1641 | 29541 | AAUGUUACACAUUGAUUAA | 3292 |
| 29541 | UAGGGAGGACUUGAAAGAG | 1642 | 29541 | UAGGGAGGACUUGAAAGAG | 1642 | 29559 | CUCUUUCAAGUCCUCCCUA | 3293 |
| 29559 | GCCACCACAUUUUCAUCGA | 1643 | 29559 | GCCACCACAUUUUCAUCGA | 1643 | 29577 | UCGAUGAAAAUGUGGUGGC | 3294 |
| 29577 | AGGCCACGCGGAGUACGAU | 1644 | 29577 | AGGCCACGCGGAGUACGAU | 1644 | 29595 | AUCGUACUCCGCGUGGCCU | 3295 |
| 29595 | UCGAGGGUACAGUGAAUAA | 1645 | 29595 | UCGAGGGUACAGUGAAUAA | 1645 | 29613 | UUAUUCACUGUACCCUCGA | 3296 |
| 29613 | AUGCUAGGGAGAGCUGCCU | 1646 | 29613 | AUGCUAGGGAGAGCUGCCU | 1646 | 29631 | AGGCAGCUCUCCCUAGCAU | 3297 |
| 29631 | UAUAUGGAAGAGCCCUAAU | 1647 | 29631 | UAUAUGGAAGAGCCCUAAU | 1647 | 29649 | AUUAGGGCUCUUCCAUAUA | 3298 |
| 29649 | UGUGUAAAAUUAAUUUUAG | 1648 | 29649 | UGUGUAAAAUUAAUUUUAG | 1648 | 29667 | CUAAAAUUAAUUUUACACA | 3299 |
| 29667 | GUAGUGCUAUCCCCAUGUG | 1649 | 29667 | GUAGUGCUAUCCCCAUGUG | 1649 | 29685 | CACAUGGGGAUAGCACUAC | 3300 |
| 29685 | GAUUUUAAUAGCUUCUUAG | 1650 | 29685 | GAUUUUAAUAGCUUCUUAG | 1650 | 29703 | CUAAGAAGCUAUUAAAAUC | 3301 |
| 29703 | GGAGAAUGACAAAAAAAAA | 1651 | 29703 | GGAGAAUGACAAAAAAAAA | 1651 | 29721 | UUUUUUUUUGUCAUUCUCC | 3302 |

[0409] The 3′-ends of the Upper sequence and the Lower sequence of the siNA construct can include an overhang sequence, for example about 1, 2, 3, or 4 nucleotides in length, preferably 2 nucleotides in length, wherein the overhanging sequence of the lower sequence is optionally complementary to a portion of the target sequence. The overhang can comprise the general structure B, BNN, NN, BNsN, or NsN, where B stands for any terminal cap moiety, N stands for any nucleotide (e.g., thymidine) and s stands for phosphorothioate or other internucleotide linkage as described herein (e.g. internucleotide linkage having Formula I). The upper sequence is also referred to as the sense strand, whereas the lower sequence is also referred to as the antisense strand. The upper and lower sequences in the Table can further comprise a chemical modification having Formulae I-VII or any combination thereof (see for example chemical modifications as shown in Table V herein).

TABLE III
SARS synthetic siNA and Target Sequences

| | | | | | | |
|---|---|---|---|---|---|---|
| Target | | Seq | | | | Seq |
| Pos | Target | ID | RPI# | Aliases | Sequence | ID |

| | | | | | |
|---|---|---|---|---|---|
| 1655 | UGAAUGAAGAGGUUGCCAUCAUU | 3303 | SARS: 1657U21 siRNA | AAUGAAGAGGUUGCCAUCATT | 3311 |
| | | | sense | | |
| 1164 | UGUUGCAUCUCCACAGGAGUGUA | 3304 | SARS: 1166U21 siRNA | UUGCAUCUCCACAGGAGUGTT | 3312 |
| | | | sense | | |
| 2381 | CUCAAAGCAAGGGACUUUACCGU | 3305 | SARS: 2383U21 siRNA | CAAAGCAAGGGACUUUACCTT | 3313 |
| | | | sense | | |
| 2598 | CUGUGUAAAUGGCCUCAUGCUCU | 3306 | SARS: 2600U21 siRNA | GUGUAAAUGGCCUCAUGCUTT | 3314 |
| | | | sense | | |
| 26572 | UUUGUGCUUGCUGCUGUCUACAG | 3307 | SARS: 26574U21 siRNA | UGUGCUUGCUGCUGUCUACTT | 3315 |
| | | | sense | | |
| 26790 | ACUUGUCAUUGGUGCUGUGAUCA | 3308 | SARS: 26792U21 siRNA | UUGUCAUUGGUGCUGUGAUTT | 3316 |
| | | | sense | | |
| 28786 | UUGAACCAGCUUGAGAGCAAAGU | 3309 | SARS: 28788U21 siRNA | GAACCAGCUUGAGAGCAAATT | 3317 |
| | | | sense | | |
| 26529 | GCUUGUUUUCCUCUGGCUCUUGU | 3310 | SARS: 26531U21 siRNA | UUGUUUUCCUCUGGCUCUUTT | 3318 |
| | | | sense | | |
| 1655 | UGAAUGAAGAGGUUGCCAUCAUU | 3303 | SARS: 1675L21 siRNA | UGAUGGCAACCUCUUCAUUTT | 3319 |
| | | | (1657C) antisense | | |
| 1164 | UGUUGCAUCUCCACAGGAGUGUA | 3304 | SARS: 1184L21 siRNA | CACUCCUGUGGAGAUGCAATT | 3320 |
| | | | (1166C) antisense | | |
| 2381 | CUCAAAGCAAGGGACUUUACCGU | 3305 | SARS: 2401L21 siRNA | GGUAAAGUCCCUUGCUUUGTT | 3321 |
| | | | (2383C) antisense | | |
| 2598 | CUGUGUAAAUGGCCUCAUGCUCU | 3306 | SARS: 2618L21 siRNA | AGCAUGAGGCCAUUUACACTT | 3322 |
| | | | (2600C) antisense | | |
| 26572 | UUUGUGCUUGCUGCUGUCUACAG | 3307 | SARS: 26592L21 siRNA | GUAGACAGCAGCAAGCACATT | 3323 |
| | | | (26574C) antisense | | |
| 26790 | ACUUGUCAUUGGUGCUGUGAUCA | 3308 | SARS: 26810L21 siRNA | AUCACAGCACCAAUGACAATT | 3324 |
| | | | (26792C) antisense | | |
| 28786 | UUGAACCAGCUUGAGAGCAAAGU | 3309 | SARS: 28806L21 siRNA | UUUGCUCUCAAGCUGGUUCTT | 3325 |
| | | | (28788C) antisense | | |
| 26529 | GCUUGUUUUCCUCUGGCUCUUGU | 3310 | SARS: 26549L21 siRNA | AAGAGCCAGAGGAAAACAATT | 3326 |
| | | | (26531C) antisense | | |
| 1655 | UGAAUGAAGAGGUUGCCAUCAUU | 3303 | SARS: 1657U21 siRNA | B AAuGAAGAGGuuGccAucATT B | 3327 |
| | | | stab04 sense | | |
| 1164 | UGUUGCAUCUCCACAGGAGUGUA | 3304 | SARS: 1166U21 siRNA | B uuGcAucuccAcAGGAGuGTT B | 3328 |
| | | | stab04 sense | | |
| 2381 | CUCAAAGCAAGGGACUUUACCGU | 3305 | SARS: 2383U21 siRNA | B cAAAGcAAGGGAcuuuAccTT B | 3329 |
| | | | stab04 sense | | |
| 2598 | CUGUGUAAAUGGCCUCAUGCUCU | 3306 | SARS: 2600U21 siRNA | B GuGuAAAuGGccucAuGcuTT B | 3330 |
| | | | stab04 sense | | |
| 26572 | UUUGUGCUUGCUGCUGUCUACAG | 3307 | SARS: 26574U21 siRNA | B uGuGcuuGcuGcuGucuAcTT B | 3331 |
| | | | stab04 sense | | |
| 26790 | ACUUGUCAUUGGUGCUGUGAUCA | 3308 | SARS: 26792U21 siRNA | B uuGucAuuGGuGcuGuGAuTT B | 3332 |
| | | | stab04 sense | | |
| 28786 | UUGAACCAGCUUGAGAGCAAAGU | 3309 | SARS: 28788U21 siRNA | B GAAccAGcuuGAGAGcAAATT B | 3333 |
| | | | stab04 sense | | |
| 26529 | GCUUGUUUUCCUCUGGCUCUUGU | 3310 | SARS: 26531U21 siRNA | B uuGuuuuccucuGGcucuuTT B | 3334 |
| | | | stab04 sense | | |
| 1655 | UGAAUGAAGAGGUUGCCAUCAUU | 3303 | SARS: 1675L21 siRNA | uGAuGGcAAccucuucAuuTsT | 3335 |
| | | | (1657C) stab05 anti- | | |
| | | | sense | | |
| 1164 | UGUUGCAUCUCCACAGGAGUGUA | 3304 | SARS: 1184L21 siRNA | cAcuccuGuGGAGAuGcAATsT | 3336 |
| | | | (1166C) stab05 anti- | | |
| | | | sense | | |
| 2381 | CUCAAAGCAAGGGACUUUACCGU | 3305 | SARS: 2401L21 siRNA | GGuAAAGucccuuGcuuuGTsT | 3337 |
| | | | (2383C) stab05 | | |
| | | | antisense | | |
| 2598 | CUGUGUAAAUGGCCUCAUGCUCU | 3306 | SARS: 2618L21 siRNA | AGcAuGAGGccAuuuAcAcTsT | 3338 |
| | | | (2600C) stab05 | | |
| | | | antisense | | |
| 26572 | UUUGUGCUUGCUGCUGUCUACAG | 3307 | SARS: 26592L21 siRNA | GuAGAcAGcAGcAAGcAcATsT | 3339 |
| | | | (26574C) stab05 anti- | | |
| | | | sense | | |
| 26790 | ACUUGUCAUUGGUGCUGUGAUCA | 3308 | SARS: 26810L21 siRNA | AucAcAGcAccAAuGAcAATsT | 3340 |
| | | | (26792C) stab05 anti- | | |
| | | | sense | | |
| 28786 | UUGAACCAGCUUGAGAGCAAAGU | 3309 | SARS: 28806L21 siRNA | uuuGcucucAAGcuGGuucTsT | 3341 |
| | | | (28788C) stab05 | | |
| | | | antisense | | |
| 26529 | GCUUGUUUUCCUCUGGCUCUUGU | 3310 | SARS: 26549L21 siRNA | AAGAGccAGAGGAAAAcAATsT | 3342 |
| | | | (26531C) stab05 anti- | | |
| | | | sense | | |
| 1655 | UGAAUGAAGAGGUUGCCAUCAUU | 3303 | SARS: 1657U21 siRNA | B AAuGAAGAGGuuGccAucATT B | 3343 |
| | | | stab07 sense | | |
| 1164 | UGUUGCAUCUCCACAGGAGUGUA | 3304 | SARS: 1166U21 siRNA | B uuGcAucuccAcAGGAGuGTT B | 3344 |
| | | | stab07 sense | | |
| 2381 | CUCAAAGCAAGGGACUUUACCGU | 3305 | SARS: 2383U21 siRNA | B cAAAGcAAGGGAcuuuAccTT B | 3345 |
| | | | stab07 sense | | |
| 2598 | CUGUGUAAAUGGCCUCAUGCUCU | 3306 | SARS: 2600U21 siRNA | B GuGuAAAuGGccucAuGcuTT B | 3346 |
| | | | stab07 sense | | |
| 26572 | UUUGUGCUUGCUGCUGUCUACAG | 3307 | SARS: 26574U21 siRNA | B uGuGcuuGcuGcuGucuAcTT B | 3347 |
| | | | stab07 sense | | |
| 26790 | ACUUGUCAUUGGUGCUGUGAUCA | 3308 | SARS: 26792U21 siRNA | B uuGucAuuGGuGcuGuGAuTT B | 3348 |
| | | | stab07 sense | | |
| 28786 | UUGAACCAGCUUGAGAGCAAAGU | 3309 | SARS: 28788U21 siRNA | B GAAccAGcuuGAGAGcAAATT B | 3349 |
| | | | stab07 sense | | |
| 26529 | GCUUGUUUUCCUCUGGCUCUUGU | 3310 | SARS: 26531U21 siRNA | B uuGuuuuccucuGGcucuuTT B | 3350 |
| | | | stab07 sense | | |
| 1655 | UGAAUGAAGAGGUUGCCAUCAUU | 3303 | SARS: 1675L21 siRNA | uGAuGGcAAccucuucAuuTsT | 3351 |
| | | | (1657C) stab11 | | |
| | | | antisense | | |
| 1164 | UGUUGCAUCUCCACAGGAGUGUA | 3304 | SARS: 1184L21 siRNA | cAcuccuGuGGAGAuGcAATsT | 3352 |
| | | | (1166C) stab11 | | |
| | | | antisense | | |
| 2381 | CUCAAAGCAAGGGACUUUACCGU | 3305 | SARS: 2401L21 siRNA | GGuAAAGucccuuGcuuuGTsT | 3353 |
| | | | (2383C) stab11 | | |
| | | | antisense | | |
| 2598 | CUGUGUAAAUGGCCUCAUGCUCU | 3306 | SARS: 2618L21 siRNA | AGcAuGAGGccAuuuAcAcTsT | 3354 |
| | | | (2600C) stab11 | | |
| | | | antisense | | |
| 26572 | UUUGUGCUUGCUGCUGUCUACAG | 3307 | SARS: 26592L21 siRNA | GuAGAcAGcAGcAAGcAcATsT | 3355 |
| | | | (26574C) stab11 anti- | | |
| | | | sense | | |
| 26790 | ACUUGUCAUUGGUGCUGUGAUCA | 3308 | SARS: 26810L21 siRNA | AucAcAGcAccAAuGAcAATsT | 3356 |
| | | | (26792C) stab11 anti- | | |
| | | | sense | | |
| 28786 | UUGAACCAGCUUGAGAGCAAAGU | 3309 | SARS: 28806L21 siRNA | uuuGcucucAAGcuGGuucTsT | 3357 |
| | | | (28788C) stab11 anti- | | |
| | | | sense | | |
| 26529 | GCUUGUUUUCCUCUGGCUCUUGU | 3310 | SARS: 26549L21 siRNA | AAGAGccAGAGGAAAAcAATsT | 3358 |
| | | | (26531C) stab11 anti- | | |
| | | | sense | | |
| 1655 | UGAAUGAAGAGGUUGCCAUCAUU | 3303 | SARS: 1657U21 siRNA | AAuGAAGAGGuuGccAucATsT | 3359 |
| | | | stab08 sense | | |
| 1164 | UGUUGCAUCUCCACAGGAGUGUA | 3304 | SARS: 1166U21 siRNA | uuGcAucuccAcAGGAGuGTsT | 3360 |
| | | | stab08 sense | | |
| 2381 | CUCAAAGCAAGGGACUUUACCGU | 3305 | SARS: 2383U21 siRNA | cAAAGcAAGGGAcuuuAccTsT | 3361 |
| | | | stab08 sense | | |
| 2598 | CUGUGUAAAUGGCCUCAUGCUCU | 3306 | SARS: 2600U21 siRNA | GuGuAAAuGGccucAuGcuTsT | 3362 |
| | | | stab08 sense | | |
| 26572 | UUUGUGCUUGCUGCUGUCUACAG | 3307 | SARS: 26574U21 siRNA | uGuGcuuGcuGcuGucuAcTsT | 3363 |
| | | | stab08 sense | | |
| 26790 | ACUUGUCAUUGGUGCUGUGAUCA | 3308 | SARS: 26792U21 siRNA | uuGucAuuGGuGcuGuGAuTsT | 3364 |
| | | | stab08 sense | | |
| 28786 | UUGAACCAGCUUGAGAGCAAAGU | 3309 | SARS: 28788U21 siRNA | GAAccAGcuuGAGAGcAAATsT | 3365 |
| | | | stab08 sense | | |
| 26529 | GCUUGUUUUCCUCUGGCUCUUGU | 3310 | SARS: 26531U21 siRNA | uuGuuuuccucuGGcucuuTsT | 3366 |
| | | | stab08 sense | | |
| 1655 | UGAAUGAAGAGGUUGCCAUCAUU | 3303 | SARS: 1675121 siRNA | uGAuGGcAAccucuucAuuTsT | 3367 |
| | | | (1657C) stab08 anti- | | |
| | | | sense | | |
| 1164 | UGUUGCAUCUCCACAGGAGUGUA | 3304 | SARS: 1184L21 siRNA | cAcuccuGuGGAGAuGcAATsT | 3368 |
| | | | (1166C) stab08 anti- | | |
| | | | sense | | |
| 2381 | CUCAAAGCAAGGGACUUUACCGU | 3305 | SARS: 2401L21 siRNA | GGuAAAGucccuuGcuuuGTsT | 3369 |
| | | | (2383C) stab08 anti- | | |
| | | | sense | | |
| 2598 | CUGUGUAAAUGGCCUCAUGCUCU | 3306 | SARS: 2618L21 siRNA | AGcAuGAGGccAuuuAcAcTsT | 3370 |
| | | | (2600C) stab08 anti- | | |
| | | | sense | | |
| 26572 | UUUGUGCUUGCUGCUGUCUACAG | 3307 | SARS: 26592L21 siRNA | GuAGAcAGcAGcAAGcAcATsT | 3371 |
| | | | (26574C) stab08 anti- | | |
| | | | sense | | |
| 26790 | ACUUGUCAUUGGUGCUGUGAUCA | 3308 | SARS: 26810L21 siRNA | AucAcAGcAccAAuGAcAATsT | 3372 |
| | | | (26792C) stab08 anti- | | |
| | | | sense | | |
| 28786 | UUGAACCAGCUUGAGAGCAAAGU | 3309 | SARS: 28806L21 siRNA | uuuGcucucAAGcuGGuucTsT | 3373 |
| | | | (28788C) stab08 anti- | | |
| | | | sense | | |
| 26529 | GCUUGUUUUCCUCUGGCUCUUGU | 3310 | SARS: 26549L21 siRNA | AAGAGccAGAGGAAAAcAATsT | 3374 |
| | | | (26531C) stab08 anti- | | |
| | | | sense | | |

Uppercase = ribonucleotide
u,c = 2′-deoxy-2-fluoro U, C
A = 2′-O-methyl Adenosine
G = 2′-O-methyl Guanosine
T = thymidine
B = inverted deoxy abasic
s = phosphorothioate linkage
A = deoxy Adenosine
G = deoxy Guanosine

TABLE IV
Non-limiting examples of Stabilization Chemistries
for chemically modified siNA constructs

| Chemistry | pyrimidine | Purine | cap | p = S | Strand |
|---|---|---|---|---|---|
| “Stab 00” | Ribo | Ribo | TT at | | S/AS |
| | | | 3′-ends | | |
| “Stab 1” | Ribo | Ribo | — | 5 at 5′-end | S/AS |
| | | | | 1 at 3′-end | |
| “Stab 2” | Ribo | Ribo | — | All | Usually AS |
| | | | | linkages | |
| “Stab 3” | 2′-fluoro | Ribo | — | 4 at 5′-end | Usually S |
| | | | | 4 at 3′-end | |
| “Stab 4” | 2′-fluoro | Ribo | 5′ and | — | Usually S |
| | | | 3′-ends | | |
| “Stab 5” | 2′-fluoro | Ribo | — | 1 at 3′-end | Usually AS |
| “Stab 6” | 2′-O-Methyl | Ribo | 5′ and | — | Usually S |
| | | | 3′-ends | | |
| “Stab 7” | 2′-fluoro | 2′-deoxy | 5′ and | — | Usually S |
| | | | 3′-ends | | |
| “Stab 8” | 2′-fluoro | 2′-O- | — | 1 at 3′-end | Usually AS |
| | | Methyl | | | |
| “Stab 9” | Ribo | Ribo | 5′ and | — | Usually S |
| | | | 3′-ends | | |
| “Stab 10” | Ribo | Ribo | — | 1 at 3′-end | Usually AS |
| “Stab 11” | 2′-fluoro | 2′-deoxy | — | 1 at 3′-end | Usually AS |
| “Stab 12” | 2′-fluoro | LNA | 5′ and | | Usually S |
| | | | 3′-ends | | |
| “Stab 13” | 2′-fluoro | LNA | | 1 at 3′-end | Usually AS |
| “Stab 14” | 2′-fluoro | 2′-deoxy | | 2 at 5′-end | Usually AS |
| | | | | 1 at 3′-end | |
| “Stab 15” | 2′-deoxy | 2′-deoxy | | 2 at 5′-end | Usually AS |
| | | | | 1 at 3′-end | |
| “Stab 16 | Ribo | 2′-O- | 5′ and | | Usually S |
| | | Methyl | 3′-ends | | |
| “Stab 17” | 2′-O-Methyl | 2′-O- | 5′ and | | Usually S |
| | | Methyl | 3′-ends | | |
| “Stab 18” | 2′-fluoro | 2′-O- | 5′ and | 1 at 3′-end | Usually S |
| | | Methyl | 3′-ends | | |
| “Stab 19” | 2′-fluoro | 2′-O- | 3′-end | | Usually AS |
| | | Methyl | | | |
| “Stab 20” | 2′-fluoro | 2′-deoxy | 3′-end | | Usually AS |
| “Stab 21” | 2′-fluoro | Ribo | 3′-end | | Usually AS |
| “Stab 22” | Ribo | Ribo | 3′-end- | | Usually AS |

CAP = any terminal cap, see for example FIG. 10.
All Stab 1-22 chemistries can comprise 3′-terminal thymidine (TT) residues
All Stab 1-22 chemistries typically comprise about 21 nucleotides, but can vary as described herein.
S = sense strand
AS = antisense strand

TABLE V

| | | | | | |
|---|---|---|---|---|---|
| Reagent | Equivalents | Amount | Wait Time* DNA | Wait Time* 2′-O-methyl | Wait Time* RNA |

A. 2.5 μmol Synthesis Cycle ABI 394 Instrument

| | | | | | | | | | |
|---|---|---|---|---|---|---|---|---|---|
| Phosphoramidites | 6.5 | 163 | μL | 45 | sec | 2.5 | min | 7.5 | min |
| S-Ethyl Tetrazole | 23.8 | 238 | μL | 45 | sec | 2.5 | min | 7.5 | min |
| Acetic Anhydride | 100 | 233 | μL | 5 | sec | 5 | sec | 5 | sec |
| N-Methyl | 186 | 233 | μL | 5 | sec | 5 | sec | 5 | sec |
| Imidazole | | | | | | | | | |
| TCA | 176 | 2.3 | mL | 21 | sec | 21 | sec | 21 | sec |
| Iodine | 11.2 | 1.7 | mL | 45 | sec | 45 | sec | 45 | sec |
| Beaucage | 12.9 | 645 | μL | 100 | sec | 300 | sec | 300 | sec |

| | | | | | | |
|---|---|---|---|---|---|---|
| Acetonitrile | NA | 6.67 | mL | NA | NA | NA |

B. 0.2 μmol Synthesis Cycle ABI 394 Instrument

| | | | | | | | | | |
|---|---|---|---|---|---|---|---|---|---|
| Phosphoramidites | 15 | 31 | μL | 45 | sec | 233 | sec | 465 | sec |
| S-Ethyl Tetrazole | 38.7 | 31 | μL | 45 | sec | 233 | min | 465 | sec |
| Acetic Anhydride | 655 | 124 | μL | 5 | sec | 5 | sec | 5 | sec |
| N-Methyl | 1245 | 124 | μL | 5 | sec | 5 | sec | 5 | sec |
| Imidazole | | | | | | | | | |
| TCA | 700 | 732 | μL | 10 | sec | 10 | sec | 10 | sec |
| Iodine | 20.6 | 244 | μL | 15 | sec | 15 | sec | 15 | sec |
| Beaucage | 7.7 | 232 | μL | 100 | sec | 300 | sec | 300 | sec |

| | | | | | | |
|---|---|---|---|---|---|---|
| Acetonitrile | NA | 2.64 | mL | NA | NA | NA |

C. 0.2 μmol Synthesis Cycle 96 well Instrument

| | Equivalents: DNA/ | Amount: DNA/2′-O- | | | Wait Time* 2′-O- | | | |
|---|---|---|---|---|---|---|---|---|
| Reagent | 2′-O-methyl/Ribo | methyl/Ribo | | Wait Time* DNA | methyl | | Wait Time* Ribo | |
| Phosphoramidites | 22/33/66 | 40/60/120 | μL | 60 sec | 180 | sec | 360 | sec |
| S-Ethyl Tetrazole | 70/105/210 | 40/60/120 | μL | 60 sec | 180 | min | 360 | sec |
| Acetic Anhydride | 265/265/265 | 50/50/50 | μL | 10 sec | 10 | sec | 10 | sec |
| N-Methyl | 502/502/502 | 50/50/50 | μL | 10 sec | 10 | sec | 10 | sec |
| Imidazole | | | | | | | | |
| TCA | 238/475/475 | 250/500/500 | μL | 15 sec | 15 | sec | 15 | sec |
| Iodine | 6.8/6.8/6.8 | 80/80/80 | μL | 30 sec | 30 | sec | 30 | sec |
| Beaucage | 34/51/51 | 80/120/120 | | 100 sec | 200 | sec | 200 | sec |
| Acetonitrile | NA | 1150/1150/1150 | μL | NA | NA | NA | | |

Wait time does not include contact time during delivery.
Tandem synthesis utilizes double coupling of linker molecule

What we claim is:

1. A chemically modified nucleic acid molecule, wherein:
(a) the nucleic acid molecule comprises a sense strand and a separate antisense strand, each strand having one or more pyrimidine nucleotides and one or more purine nucleotides;
(b) each strand of the nucleic acid molecule is independently 18 to 27 nucleotides in length;
(c) an 18 to 27 nucleotide sequence of the antisense strand is complementary to a SARS virus RNA sequence comprising SEQ ID NO:3393;
(d) an 18 to 27 nucleotide sequence of the sense strand is complementary to the antisense strand and comprises an 18 to 27 nucleotide sequence of the SARS virus RNA sequence; and
(e) 50 percent or more of the nucleotides in at least one strand comprise a 2-sugar modification, wherein the 2′-sugar modification of any of the pyrimidine nucleotides differs from the 2′-sugar modification of any of the purine nucleotides.

2. The nucleic acid molecule of claim 1, wherein 50 percent or more of the nucleotides in each strand comprise a 2′-sugar modification.

3. The nucleic acid molecule of claim 1, wherein the 2′-sugar modification is selected from the group consisting of 2′-deoxy-2′-fluoro, 2′-O-methyl, and 2′-deoxy.

4. The nucleic acid of claim 3, wherein the 2′-deoxy-2′-fluoro sugar modification is a pyrimidine modification.

5. The nucleic acid of claim 3, wherein the 2′-deoxy sugar modification is a pyrimidine modification.

6. The nucleic acid of claim 3, wherein the 2′-O-methyl sugar modification is a pyrimidine modification.

7. The nucleic acid molecule of claim 4, wherein said pyrimidine modification is in the sense strand, the antisense strand, or both the sense strand and antisense strand.

8. The nucleic acid molecule of claim 6, wherein said pyrimidine modification is in the sense strand, the antisense strand, or both the sense strand and antisense strand.

9. The nucleic acid molecule of claim 3, wherein the 2′-deoxy sugar modification is a purine modification.

10. The nucleic acid molecule of claim 3, wherein the 2′-O-methyl sugar modification is a purine modification.

11. The nucleic acid molecule of claim 9, wherein the purine modification is in the sense strand.

12. The nucleic acid molecule of claim 10, wherein the purine modification is in the antisense strand.

13. The nucleic acid molecule of claim 1, wherein the nucleic acid molecule comprises ribonucleotides.

14. The nucleic acid molecule of claim 1, wherein the sense strand includes a terminal cap moiety at the 5′-end, the 3′-end, or both of the 5′- and 3′-ends.

15. The nucleic acid molecule of claim 14, wherein the terminal cap moiety is an inverted deoxy abasic moiety.

16. The nucleic acid molecule of claim 1, wherein said nucleic acid molecule includes one or more phosphorothioate internucleotide linkages.

17. The nucleic acid molecule of claim 16, wherein one of the phosphorothioate internucleotide linkages is at the 3′-end of the antisense strand.

18. The nucleic acid molecule of claim 1, wherein the 5′-end of the antisense strand includes a terminal phosphate group.

19. The nucleic acid molecule of claim 1, wherein the sense strand, the antisense strand, or both the sense strand and the antisense strand include a 3′-overhang.

20. A composition comprising the nucleic acid molecule of claim 1, in a pharmaceutically acceptable carrier or diluent.

The application's sequence listing, which the Patent Office published only in electronic form, follows.

SEQUENCE LISTING (3397 sequences)

SEQ ID NO: 1 - RNA, 19 nt, Artificial Sequence
  Synthetic Target Sequence/siNA sense region
acccaggaaaagccaacca

SEQ ID NO: 2 - RNA, 19 nt, Artificial Sequence
  Synthetic Target Sequence/siNA sense region
aaccucgaucucuuguaga

SEQ ID NO: 3 - RNA, 19 nt, Artificial Sequence
  Synthetic Target Sequence/siNA sense region
aucuguucucuaaacgaac

SEQ ID NO: 4 - RNA, 19 nt, Artificial Sequence
  Synthetic Target Sequence/siNA sense region
cuuuaaaaucuguguagcu

SEQ ID NO: 5 - RNA, 19 nt, Artificial Sequence
  Synthetic Target Sequence/siNA sense region
ugucgcucggcugcaugcc

SEQ ID NO: 6 - RNA, 19 nt, Artificial Sequence
  Synthetic Target Sequence/siNA sense region
cuagugcaccuacgcagua

SEQ ID NO: 7 - RNA, 19 nt, Artificial Sequence
  Synthetic Target Sequence/siNA sense region
auaaacaauaauaaauuuu

SEQ ID NO: 8 - RNA, 19 nt, Artificial Sequence
  Synthetic Target Sequence/siNA sense region
uacugucguugacaagaaa

SEQ ID NO: 9 - RNA, 19 nt, Artificial Sequence
  Synthetic Target Sequence/siNA sense region
acgaguaacucgucccucu

SEQ ID NO: 10 - RNA, 19 nt, Artificial Sequence
  Synthetic Target Sequence/siNA sense region
uucugcagacugcuuacgg

SEQ ID NO: 11 - RNA, 19 nt, Artificial Sequence
  Synthetic Target Sequence/siNA sense region
guuucguccguguugcagu

SEQ ID NO: 12 - RNA, 19 nt, Artificial Sequence
  Synthetic Target Sequence/siNA sense region
ucgaucaucagcauaccua

SEQ ID NO: 13 - RNA, 19 nt, Artificial Sequence
  Synthetic Target Sequence/siNA sense region
agguuucguccggguguga

SEQ ID NO: 14 - RNA, 19 nt, Artificial Sequence
  Synthetic Target Sequence/siNA sense region
accgaaagguaagauggag

SEQ ID NO: 15 - RNA, 19 nt, Artificial Sequence
  Synthetic Target Sequence/siNA sense region
gagccuuguucuugguguc

SEQ ID NO: 16 - RNA, 19 nt, Artificial Sequence
  Synthetic Target Sequence/siNA sense region
caacgagaaaacacacguc

SEQ ID NO: 17 - RNA, 19 nt, Artificial Sequence
  Synthetic Target Sequence/siNA sense region
ccaacucaguuugccuguc

SEQ ID NO: 18 - RNA, 19 nt, Artificial Sequence
  Synthetic Target Sequence/siNA sense region
ccuucagguuagagacgug

SEQ ID NO: 19 - RNA, 19 nt, Artificial Sequence
  Synthetic Target Sequence/siNA sense region
gcuagugcguggcuucggg

SEQ ID NO: 20 - RNA, 19 nt, Artificial Sequence
  Synthetic Target Sequence/siNA sense region
ggacucuguggaagaggcc

SEQ ID NO: 21 - RNA, 19 nt, Artificial Sequence
  Synthetic Target Sequence/siNA sense region
ccuaucggaggcacgugaa

SEQ ID NO: 22 - RNA, 19 nt, Artificial Sequence
  Synthetic Target Sequence/siNA sense region
acaccucaaaaauggcacu

SEQ ID NO: 23 - RNA, 19 nt, Artificial Sequence
  Synthetic Target Sequence/siNA sense region
uuguggucuaguagagcug

SEQ ID NO: 24 - RNA, 19 nt, Artificial Sequence
  Synthetic Target Sequence/siNA sense region
ggaaaaaggcguacugccc

SEQ ID NO: 25 - RNA, 19 nt, Artificial Sequence
  Synthetic Target Sequence/siNA sense region
ccagcuugaacagcccuau

SEQ ID NO: 26 - RNA, 19 nt, Artificial Sequence
  Synthetic Target Sequence/siNA sense region
uguguucauuaaacguucu

SEQ ID NO: 27 - RNA, 19 nt, Artificial Sequence
  Synthetic Target Sequence/siNA sense region
ugaugccuuaagcaccaau

SEQ ID NO: 28 - RNA, 19 nt, Artificial Sequence
  Synthetic Target Sequence/siNA sense region
ucacggccacaaggucguu

SEQ ID NO: 29 - RNA, 19 nt, Artificial Sequence
  Synthetic Target Sequence/siNA sense region
ugagcugguugcagaaaug

SEQ ID NO: 30 - RNA, 19 nt, Artificial Sequence
  Synthetic Target Sequence/siNA sense region
ggacggcauucaguacggu

SEQ ID NO: 31 - RNA, 19 nt, Artificial Sequence
  Synthetic Target Sequence/siNA sense region
ucguagcgguauaacacug

SEQ ID NO: 32 - RNA, 19 nt, Artificial Sequence
  Synthetic Target Sequence/siNA sense region
gggaguacucgugccacau

SEQ ID NO: 33 - RNA, 19 nt, Artificial Sequence
  Synthetic Target Sequence/siNA sense region
ugugggcgaaaccccaauu

SEQ ID NO: 34 - RNA, 19 nt, Artificial Sequence
  Synthetic Target Sequence/siNA sense region
ugcauaccgcaauguucuu

SEQ ID NO: 35 - RNA, 19 nt, Artificial Sequence
  Synthetic Target Sequence/siNA sense region
ucuucguaagaacgguaau

SEQ ID NO: 36 - RNA, 19 nt, Artificial Sequence
  Synthetic Target Sequence/siNA sense region
uaagggagccgguggucau

SEQ ID NO: 37 - RNA, 19 nt, Artificial Sequence
  Synthetic Target Sequence/siNA sense region
uagcuauggcaucgaucua

SEQ ID NO: 38 - RNA, 19 nt, Artificial Sequence
  Synthetic Target Sequence/siNA sense region
aaagucuuaugacuuaggu

SEQ ID NO: 39 - RNA, 19 nt, Artificial Sequence
  Synthetic Target Sequence/siNA sense region
ugacgagcuuggcacugau

SEQ ID NO: 40 - RNA, 19 nt, Artificial Sequence
  Synthetic Target Sequence/siNA sense region
ucccauugaagauuaugaa

SEQ ID NO: 41 - RNA, 19 nt, Artificial Sequence
  Synthetic Target Sequence/siNA sense region
acaaaacuggaacacuaag

SEQ ID NO: 42 - RNA, 19 nt, Artificial Sequence
  Synthetic Target Sequence/siNA sense region
gcauggcaguggugcacuc

SEQ ID NO: 43 - RNA, 19 nt, Artificial Sequence
  Synthetic Target Sequence/siNA sense region
ccgugaacucacucgugag

SEQ ID NO: 44 - RNA, 19 nt, Artificial Sequence
  Synthetic Target Sequence/siNA sense region
gcucaauggaggugcaguc

SEQ ID NO: 45 - RNA, 19 nt, Artificial Sequence
  Synthetic Target Sequence/siNA sense region
cacucgcuaugucgacaac

SEQ ID NO: 46 - RNA, 19 nt, Artificial Sequence
  Synthetic Target Sequence/siNA sense region
caauuucuguggcccagau

SEQ ID NO: 47 - RNA, 19 nt, Artificial Sequence
  Synthetic Target Sequence/siNA sense region
uggguacccucuugauugc

SEQ ID NO: 48 - RNA, 19 nt, Artificial Sequence
  Synthetic Target Sequence/siNA sense region
caucaaagauuuucucgca

SEQ ID NO: 49 - RNA, 19 nt, Artificial Sequence
  Synthetic Target Sequence/siNA sense region
acgcgcgggcaagucaaug

SEQ ID NO: 50 - RNA, 19 nt, Artificial Sequence
  Synthetic Target Sequence/siNA sense region
gugcacucuuuccgaacaa

SEQ ID NO: 51 - RNA, 19 nt, Artificial Sequence
  Synthetic Target Sequence/siNA sense region
acuugauuacaucgagucg

SEQ ID NO: 52 - RNA, 19 nt, Artificial Sequence
  Synthetic Target Sequence/siNA sense region
gaagagaggugucuacugc

SEQ ID NO: 53 - RNA, 19 nt, Artificial Sequence
  Synthetic Target Sequence/siNA sense region
cugccgugaccaugagcau

SEQ ID NO: 54 - RNA, 19 nt, Artificial Sequence
  Synthetic Target Sequence/siNA sense region
ugaaauugccugguucacu

SEQ ID NO: 55 - RNA, 19 nt, Artificial Sequence
  Synthetic Target Sequence/siNA sense region
ugagcgcucugauaagagc

SEQ ID NO: 56 - RNA, 19 nt, Artificial Sequence
  Synthetic Target Sequence/siNA sense region
cuacgagcaccagacaccc

SEQ ID NO: 57 - RNA, 19 nt, Artificial Sequence
  Synthetic Target Sequence/siNA sense region
cuucgaaauuaagagugcc

SEQ ID NO: 58 - RNA, 19 nt, Artificial Sequence
  Synthetic Target Sequence/siNA sense region
caagaaauuugacacuuuc

SEQ ID NO: 59 - RNA, 19 nt, Artificial Sequence
  Synthetic Target Sequence/siNA sense region
caaaggggaaugcccaaag

SEQ ID NO: 60 - RNA, 19 nt, Artificial Sequence
  Synthetic Target Sequence/siNA sense region
guuuguguuuccucuuaac

SEQ ID NO: 61 - RNA, 19 nt, Artificial Sequence
  Synthetic Target Sequence/siNA sense region
cucaaaagucaaagucauu

SEQ ID NO: 62 - RNA, 19 nt, Artificial Sequence
  Synthetic Target Sequence/siNA sense region
ucaaccacguguugaaaag

SEQ ID NO: 63 - RNA, 19 nt, Artificial Sequence
  Synthetic Target Sequence/siNA sense region
gaaaaagacugaggguuuc

SEQ ID NO: 64 - RNA, 19 nt, Artificial Sequence
  Synthetic Target Sequence/siNA sense region
cauggggcguauacgcucu

SEQ ID NO: 65 - RNA, 19 nt, Artificial Sequence
  Synthetic Target Sequence/siNA sense region
uguguacccuguugcaucu

SEQ ID NO: 66 - RNA, 19 nt, Artificial Sequence
  Synthetic Target Sequence/siNA sense region
uccacaggaguguaacaau

SEQ ID NO: 67 - RNA, 19 nt, Artificial Sequence
  Synthetic Target Sequence/siNA sense region
uaugcacuugucuaccuug

SEQ ID NO: 68 - RNA, 19 nt, Artificial Sequence
  Synthetic Target Sequence/siNA sense region
gaugaaauguaaucauugc

SEQ ID NO: 69 - RNA, 19 nt, Artificial Sequence
  Synthetic Target Sequence/siNA sense region
cgaugaaguuucauggcag

SEQ ID NO: 70 - RNA, 19 nt, Artificial Sequence
  Synthetic Target Sequence/siNA sense region
gacgugcgacuuucugaaa

SEQ ID NO: 71 - RNA, 19 nt, Artificial Sequence
  Synthetic Target Sequence/siNA sense region
agccacuugugaacauugu

SEQ ID NO: 72 - RNA, 19 nt, Artificial Sequence
  Synthetic Target Sequence/siNA sense region
uggcacugaaaauuuaguu

SEQ ID NO: 73 - RNA, 19 nt, Artificial Sequence
  Synthetic Target Sequence/siNA sense region
uauugaaggaccuacuaca

SEQ ID NO: 74 - RNA, 19 nt, Artificial Sequence
  Synthetic Target Sequence/siNA sense region
auguggguaccuaccuacu

SEQ ID NO: 75 - RNA, 19 nt, Artificial Sequence
  Synthetic Target Sequence/siNA sense region
uaaugcuguagugaaaaug

SEQ ID NO: 76 - RNA, 19 nt, Artificial Sequence
  Synthetic Target Sequence/siNA sense region
gccauguccugccugucaa

SEQ ID NO: 77 - RNA, 19 nt, Artificial Sequence
  Synthetic Target Sequence/siNA sense region
agacccagagauuggaccu

SEQ ID NO: 78 - RNA, 19 nt, Artificial Sequence
  Synthetic Target Sequence/siNA sense region
ugagcauaguguugcagau

SEQ ID NO: 79 - RNA, 19 nt, Artificial Sequence
  Synthetic Target Sequence/siNA sense region
uuaucacaaccacucaaac

SEQ ID NO: 80 - RNA, 19 nt, Artificial Sequence
  Synthetic Target Sequence/siNA sense region
cauugaaacucgacuccgc

SEQ ID NO: 81 - RNA, 19 nt, Artificial Sequence
  Synthetic Target Sequence/siNA sense region
caagggagguaggacuaga

SEQ ID NO: 82 - RNA, 19 nt, Artificial Sequence
  Synthetic Target Sequence/siNA sense region
auguuuuggaggcugugug

SEQ ID NO: 83 - RNA, 19 nt, Artificial Sequence
  Synthetic Target Sequence/siNA sense region
guuugccuauguuggcugc

SEQ ID NO: 84 - RNA, 19 nt, Artificial Sequence
  Synthetic Target Sequence/siNA sense region
cuauaauaagcgugccuac

SEQ ID NO: 85 - RNA, 19 nt, Artificial Sequence
  Synthetic Target Sequence/siNA sense region
cuggguuccucgugcuagu

SEQ ID NO: 86 - RNA, 19 nt, Artificial Sequence
  Synthetic Target Sequence/siNA sense region
ugcugauauuggcucaggc

SEQ ID NO: 87 - RNA, 19 nt, Artificial Sequence
  Synthetic Target Sequence/siNA sense region
ccauacuggcauuacuggu

SEQ ID NO: 88 - RNA, 19 nt, Artificial Sequence
  Synthetic Target Sequence/siNA sense region
ugacaauguggagaccuug

SEQ ID NO: 89 - RNA, 19 nt, Artificial Sequence
  Synthetic Target Sequence/siNA sense region
gaaugaggaucuccuugag

SEQ ID NO: 90 - RNA, 19 nt, Artificial Sequence
  Synthetic Target Sequence/siNA sense region
gauacugagucgugaacgu

SEQ ID NO: 91 - RNA, 19 nt, Artificial Sequence
  Synthetic Target Sequence/siNA sense region
uguuaacauuaacauuguu

SEQ ID NO: 92 - RNA, 19 nt, Artificial Sequence
  Synthetic Target Sequence/siNA sense region
uggcgauuuucauuugaau

SEQ ID NO: 93 - RNA, 19 nt, Artificial Sequence
  Synthetic Target Sequence/siNA sense region
ugaagagguugccaucauu

SEQ ID NO: 94 - RNA, 19 nt, Artificial Sequence
  Synthetic Target Sequence/siNA sense region
uuuggcaucuuucucugcu

SEQ ID NO: 95 - RNA, 19 nt, Artificial Sequence
  Synthetic Target Sequence/siNA sense region
uucuacaagugccuuuauu

SEQ ID NO: 96 - RNA, 19 nt, Artificial Sequence
  Synthetic Target Sequence/siNA sense region
ugacacuauaaagagucuu

SEQ ID NO: 97 - RNA, 19 nt, Artificial Sequence
  Synthetic Target Sequence/siNA sense region
ugauuacaagucuuucaaa

SEQ ID NO: 98 - RNA, 19 nt, Artificial Sequence
  Synthetic Target Sequence/siNA sense region
aaccauuguugaguccugc

SEQ ID NO: 99 - RNA, 19 nt, Artificial Sequence
  Synthetic Target Sequence/siNA sense region
cgguaacuauaaaguuacc

SEQ ID NO: 100 - RNA, 19 nt, Artificial Sequence
  Synthetic Target Sequence/siNA sense region
caagggaaagcccguaaaa

SEQ ID NO: 101 - RNA, 19 nt, Artificial Sequence
  Synthetic Target Sequence/siNA sense region
aggugcuuggaacauugga

SEQ ID NO: 102 - RNA, 19 nt, Artificial Sequence
  Synthetic Target Sequence/siNA sense region
acaacagagaucaguuuua

SEQ ID NO: 103 - RNA, 19 nt, Artificial Sequence
  Synthetic Target Sequence/siNA sense region
aacaccacugugugguuuu

SEQ ID NO: 104 - RNA, 19 nt, Artificial Sequence
  Synthetic Target Sequence/siNA sense region
ucccucacaggcugcuggu

SEQ ID NO: 105 - RNA, 19 nt, Artificial Sequence
  Synthetic Target Sequence/siNA sense region
uguuaucagaucaauuuuu

SEQ ID NO: 106 - RNA, 19 nt, Artificial Sequence
  Synthetic Target Sequence/siNA sense region
ugcgcgcacacuugaugca

SEQ ID NO: 107 - RNA, 19 nt, Artificial Sequence
  Synthetic Target Sequence/siNA sense region
agcaaaccacucaauuccu

SEQ ID NO: 108 - RNA, 19 nt, Artificial Sequence
  Synthetic Target Sequence/siNA sense region
ugauuugcaaagagcagcu

SEQ ID NO: 109 - RNA, 19 nt, Artificial Sequence
  Synthetic Target Sequence/siNA sense region
ugucaccauacuugauggu

SEQ ID NO: 110 - RNA, 19 nt, Artificial Sequence
  Synthetic Target Sequence/siNA sense region
uauuucugaacagucauua

SEQ ID NO: 111 - RNA, 19 nt, Artificial Sequence
  Synthetic Target Sequence/siNA sense region
acgucuugucgacgccaug

SEQ ID NO: 112 - RNA, 19 nt, Artificial Sequence
  Synthetic Target Sequence/siNA sense region
gguuuauacuucagaccug

SEQ ID NO: 113 - RNA, 19 nt, Artificial Sequence
  Synthetic Target Sequence/siNA sense region
gcucaccaacagugucauu

SEQ ID NO: 114 - RNA, 19 nt, Artificial Sequence
  Synthetic Target Sequence/siNA sense region
uauuauggcauauguaacu

SEQ ID NO: 115 - RNA, 19 nt, Artificial Sequence
  Synthetic Target Sequence/siNA sense region
ugguggucuuguacaacag

SEQ ID NO: 116 - RNA, 19 nt, Artificial Sequence
  Synthetic Target Sequence/siNA sense region
gacuucucagugguugucu

SEQ ID NO: 117 - RNA, 19 nt, Artificial Sequence
  Synthetic Target Sequence/siNA sense region
uaaucuuuugggcacuacu

SEQ ID NO: 118 - RNA, 19 nt, Artificial Sequence
  Synthetic Target Sequence/siNA sense region
uguugaaaaacucaggccu

SEQ ID NO: 119 - RNA, 19 nt, Artificial Sequence
  Synthetic Target Sequence/siNA sense region
uaucuuugaauggauugag

SEQ ID NO: 120 - RNA, 19 nt, Artificial Sequence
  Synthetic Target Sequence/siNA sense region
ggcgaaacuuagugcagga

SEQ ID NO: 121 - RNA, 19 nt, Artificial Sequence
  Synthetic Target Sequence/siNA sense region
aguugaauuucucaaggau

SEQ ID NO: 122 - RNA, 19 nt, Artificial Sequence
  Synthetic Target Sequence/siNA sense region
ugcuugggagauucucaaa

SEQ ID NO: 123 - RNA, 19 nt, Artificial Sequence
  Synthetic Target Sequence/siNA sense region
auuucucauuacagguguu

SEQ ID NO: 124 - RNA, 19 nt, Artificial Sequence
  Synthetic Target Sequence/siNA sense region
uuuugacaucgucaagggu

SEQ ID NO: 125 - RNA, 19 nt, Artificial Sequence
  Synthetic Target Sequence/siNA sense region
ucaaauacagguugcuuca

SEQ ID NO: 126 - RNA, 19 nt, Artificial Sequence
  Synthetic Target Sequence/siNA sense region
agauaacaucaaggauugu

SEQ ID NO: 127 - RNA, 19 nt, Artificial Sequence
  Synthetic Target Sequence/siNA sense region
uguaaaaugcuucauugau

SEQ ID NO: 128 - RNA, 19 nt, Artificial Sequence
  Synthetic Target Sequence/siNA sense region
uguuguuaacaaggcacuc

SEQ ID NO: 129 - RNA, 19 nt, Artificial Sequence
  Synthetic Target Sequence/siNA sense region
cgaaaugugcauugaucaa

SEQ ID NO: 130 - RNA, 19 nt, Artificial Sequence
  Synthetic Target Sequence/siNA sense region
agucacuaucgcuggcgca

SEQ ID NO: 131 - RNA, 19 nt, Artificial Sequence
  Synthetic Target Sequence/siNA sense region
aaaguugcgaucacucaac

SEQ ID NO: 132 - RNA, 19 nt, Artificial Sequence
  Synthetic Target Sequence/siNA sense region
cuuaggugaagucuucauc

SEQ ID NO: 133 - RNA, 19 nt, Artificial Sequence
  Synthetic Target Sequence/siNA sense region
cgcucaaagcaagggacuu

SEQ ID NO: 134 - RNA, 19 nt, Artificial Sequence
  Synthetic Target Sequence/siNA sense region
uuaccgucaguguauacgu

SEQ ID NO: 135 - RNA, 19 nt, Artificial Sequence
  Synthetic Target Sequence/siNA sense region
uggcaaggagcagcugcaa

SEQ ID NO: 136 - RNA, 19 nt, Artificial Sequence
  Synthetic Target Sequence/siNA sense region
acuacucaugccucuuaag

SEQ ID NO: 137 - RNA, 19 nt, Artificial Sequence
  Synthetic Target Sequence/siNA sense region
ggcaccaaaagaaguaacc

SEQ ID NO: 138 - RNA, 19 nt, Artificial Sequence
  Synthetic Target Sequence/siNA sense region
cuuucuugaaggugauuca

SEQ ID NO: 139 - RNA, 19 nt, Artificial Sequence
  Synthetic Target Sequence/siNA sense region
acaugacacaguacuuacc

SEQ ID NO: 140 - RNA, 19 nt, Artificial Sequence
  Synthetic Target Sequence/siNA sense region
cucugaggagguuguucuc

SEQ ID NO: 141 - RNA, 19 nt, Artificial Sequence
  Synthetic Target Sequence/siNA sense region
caagaacggugaacucgaa

SEQ ID NO: 142 - RNA, 19 nt, Artificial Sequence
  Synthetic Target Sequence/siNA sense region
agcacucgagacgcccguu

SEQ ID NO: 143 - RNA, 19 nt, Artificial Sequence
  Synthetic Target Sequence/siNA sense region
ugauagcuucacaaaugga

SEQ ID NO: 144 - RNA, 19 nt, Artificial Sequence
  Synthetic Target Sequence/siNA sense region
agcuaucgucggcacacca

SEQ ID NO: 145 - RNA, 19 nt, Artificial Sequence
  Synthetic Target Sequence/siNA sense region
agucuguguaaauggccuc

SEQ ID NO: 146 - RNA, 19 nt, Artificial Sequence
  Synthetic Target Sequence/siNA sense region
caugcucuuagagauuaag

SEQ ID NO: 147 - RNA, 19 nt, Artificial Sequence
  Synthetic Target Sequence/siNA sense region
ggacaaagaacaauacugc

SEQ ID NO: 148 - RNA, 19 nt, Artificial Sequence
  Synthetic Target Sequence/siNA sense region
cgcauugucuccugguuua

SEQ ID NO: 149 - RNA, 19 nt, Artificial Sequence
  Synthetic Target Sequence/siNA sense region
acuggcuacaaacaauguc

SEQ ID NO: 150 - RNA, 19 nt, Artificial Sequence
  Synthetic Target Sequence/siNA sense region
cuuucgcuuaaaagggggu

SEQ ID NO: 151 - RNA, 19 nt, Artificial Sequence
  Synthetic Target Sequence/siNA sense region
ugcaccaauuaaaggugua

SEQ ID NO: 152 - RNA, 19 nt, Artificial Sequence
  Synthetic Target Sequence/siNA sense region
aaccuuuggagaagauacu

SEQ ID NO: 153 - RNA, 19 nt, Artificial Sequence
  Synthetic Target Sequence/siNA sense region
uguuugggaaguucaaggu

SEQ ID NO: 154 - RNA, 19 nt, Artificial Sequence
  Synthetic Target Sequence/siNA sense region
uuacaagaaugugagaauc

SEQ ID NO: 155 - RNA, 19 nt, Artificial Sequence
  Synthetic Target Sequence/siNA sense region
cacauuugagcuugaugaa

SEQ ID NO: 156 - RNA, 19 nt, Artificial Sequence
  Synthetic Target Sequence/siNA sense region
acguguugacaaagugcuu

SEQ ID NO: 157 - RNA, 19 nt, Artificial Sequence
  Synthetic Target Sequence/siNA sense region
uaaugaaaagugcucuguc

SEQ ID NO: 158 - RNA, 19 nt, Artificial Sequence
  Synthetic Target Sequence/siNA sense region
cuacacuguugaauccggu

SEQ ID NO: 159 - RNA, 19 nt, Artificial Sequence
  Synthetic Target Sequence/siNA sense region
uaccgaaguuacugaguuu

SEQ ID NO: 160 - RNA, 19 nt, Artificial Sequence
  Synthetic Target Sequence/siNA sense region
ugcauguguuguagcagag

SEQ ID NO: 161 - RNA, 19 nt, Artificial Sequence
  Synthetic Target Sequence/siNA sense region
ggcuguugugaagacuuua

SEQ ID NO: 162 - RNA, 19 nt, Artificial Sequence
  Synthetic Target Sequence/siNA sense region
acaaccaguuucugaucuc

SEQ ID NO: 163 - RNA, 19 nt, Artificial Sequence
  Synthetic Target Sequence/siNA sense region
ccuuaccaacauggguauu

SEQ ID NO: 164 - RNA, 19 nt, Artificial Sequence
  Synthetic Target Sequence/siNA sense region
ugaucuugaugaguggagu

SEQ ID NO: 165 - RNA, 19 nt, Artificial Sequence
  Synthetic Target Sequence/siNA sense region
uguagcuacauucuacuua

SEQ ID NO: 166 - RNA, 19 nt, Artificial Sequence
  Synthetic Target Sequence/siNA sense region
auuugaugaugcuggugaa

SEQ ID NO: 167 - RNA, 19 nt, Artificial Sequence
  Synthetic Target Sequence/siNA sense region
agaaaacuuuucaucacgu

SEQ ID NO: 168 - RNA, 19 nt, Artificial Sequence
  Synthetic Target Sequence/siNA sense region
uauguauuguuccuuuuac

SEQ ID NO: 169 - RNA, 19 nt, Artificial Sequence
  Synthetic Target Sequence/siNA sense region
cccuccagaugaggaagaa

SEQ ID NO: 170 - RNA, 19 nt, Artificial Sequence
  Synthetic Target Sequence/siNA sense region
agaggacgaugcagagugu

SEQ ID NO: 171 - RNA, 19 nt, Artificial Sequence
  Synthetic Target Sequence/siNA sense region
ugaggaagaagaaauugau

SEQ ID NO: 172 - RNA, 19 nt, Artificial Sequence
  Synthetic Target Sequence/siNA sense region
ugaaaccugugaacaugag

SEQ ID NO: 173 - RNA, 19 nt, Artificial Sequence
  Synthetic Target Sequence/siNA sense region
guacgguacagaggaugau

SEQ ID NO: 174 - RNA, 19 nt, Artificial Sequence
  Synthetic Target Sequence/siNA sense region
uuaucaaggucucccucug

SEQ ID NO: 175 - RNA, 19 nt, Artificial Sequence
  Synthetic Target Sequence/siNA sense region
ggaauuuggugccucagcu

SEQ ID NO: 176 - RNA, 19 nt, Artificial Sequence
  Synthetic Target Sequence/siNA sense region
ugaaacaguucgaguugag

SEQ ID NO: 177 - RNA, 19 nt, Artificial Sequence
  Synthetic Target Sequence/siNA sense region
ggaagaagaagaggaagac

SEQ ID NO: 178 - RNA, 19 nt, Artificial Sequence
  Synthetic Target Sequence/siNA sense region
cuggcuggaugauacuacu

SEQ ID NO: 179 - RNA, 19 nt, Artificial Sequence
  Synthetic Target Sequence/siNA sense region
ugagcaaucagagauugag

SEQ ID NO: 180 - RNA, 19 nt, Artificial Sequence
  Synthetic Target Sequence/siNA sense region
gccagaaccagaaccuaca

SEQ ID NO: 181 - RNA, 19 nt, Artificial Sequence
  Synthetic Target Sequence/siNA sense region
accugaagaaccaguuaau

SEQ ID NO: 182 - RNA, 19 nt, Artificial Sequence
  Synthetic Target Sequence/siNA sense region
ucaguuuacugguuauuua

SEQ ID NO: 183 - RNA, 19 nt, Artificial Sequence
  Synthetic Target Sequence/siNA sense region
aaaacuuacugacaauguu

SEQ ID NO: 184 - RNA, 19 nt, Artificial Sequence
  Synthetic Target Sequence/siNA sense region
ugccauuaaauguguugac

SEQ ID NO: 185 - RNA, 19 nt, Artificial Sequence
  Synthetic Target Sequence/siNA sense region
caucguuaaggaggcacaa

SEQ ID NO: 186 - RNA, 19 nt, Artificial Sequence
  Synthetic Target Sequence/siNA sense region
aagugcuaauccuauggug

SEQ ID NO: 187 - RNA, 19 nt, Artificial Sequence
  Synthetic Target Sequence/siNA sense region
gauuguaaaugcugcuaac

SEQ ID NO: 188 - RNA, 19 nt, Artificial Sequence
  Synthetic Target Sequence/siNA sense region
cauacaccugaaacauggu

SEQ ID NO: 189 - RNA, 19 nt, Artificial Sequence
  Synthetic Target Sequence/siNA sense region
uggugguguagcaggugca

SEQ ID NO: 190 - RNA, 19 nt, Artificial Sequence
  Synthetic Target Sequence/siNA sense region
acucaacaaggcaaccaau

SEQ ID NO: 191 - RNA, 19 nt, Artificial Sequence
  Synthetic Target Sequence/siNA sense region
uggugccaugcaaaaggag

SEQ ID NO: 192 - RNA, 19 nt, Artificial Sequence
  Synthetic Target Sequence/siNA sense region
gagugaugauuacauuaag

SEQ ID NO: 193 - RNA, 19 nt, Artificial Sequence
  Synthetic Target Sequence/siNA sense region
gcuaaauggcccucuuaca

SEQ ID NO: 194 - RNA, 19 nt, Artificial Sequence
  Synthetic Target Sequence/siNA sense region
aguaggagggucuuguuug

SEQ ID NO: 195 - RNA, 19 nt, Artificial Sequence
  Synthetic Target Sequence/siNA sense region
gcuuucuggacauaaucuu

SEQ ID NO: 196 - RNA, 19 nt, Artificial Sequence
  Synthetic Target Sequence/siNA sense region
ugcuaagaagugucugcau

SEQ ID NO: 197 - RNA, 19 nt, Artificial Sequence
  Synthetic Target Sequence/siNA sense region
uguuguuggaccuaaccua

SEQ ID NO: 198 - RNA, 19 nt, Artificial Sequence
  Synthetic Target Sequence/siNA sense region
aaaugcaggugaggacauc

SEQ ID NO: 199 - RNA, 19 nt, Artificial Sequence
  Synthetic Target Sequence/siNA sense region
ccagcuucuuaaggcagca

SEQ ID NO: 200 - RNA, 19 nt, Artificial Sequence
  Synthetic Target Sequence/siNA sense region
auaugaaaauuucaauuca

SEQ ID NO: 201 - RNA, 19 nt, Artificial Sequence
  Synthetic Target Sequence/siNA sense region
acaggacaucuuacuugca

SEQ ID NO: 202 - RNA, 19 nt, Artificial Sequence
  Synthetic Target Sequence/siNA sense region
accauuguugucagcaggc

SEQ ID NO: 203 - RNA, 19 nt, Artificial Sequence
  Synthetic Target Sequence/siNA sense region
cauauuuggugcuaaacca

SEQ ID NO: 204 - RNA, 19 nt, Artificial Sequence
  Synthetic Target Sequence/siNA sense region
acuucagucuuuacaagug

SEQ ID NO: 205 - RNA, 19 nt, Artificial Sequence
  Synthetic Target Sequence/siNA sense region
gugcgugcagacgguucgu

SEQ ID NO: 206 - RNA, 19 nt, Artificial Sequence
  Synthetic Target Sequence/siNA sense region
uacacagguuuauauugca

SEQ ID NO: 207 - RNA, 19 nt, Artificial Sequence
  Synthetic Target Sequence/siNA sense region
agucaaugacaaagcucuu

SEQ ID NO: 208 - RNA, 19 nt, Artificial Sequence
  Synthetic Target Sequence/siNA sense region
uuaugagcagguugucaug

SEQ ID NO: 209 - RNA, 19 nt, Artificial Sequence
  Synthetic Target Sequence/siNA sense region
ggauuaucuugauaaccug

SEQ ID NO: 210 - RNA, 19 nt, Artificial Sequence
  Synthetic Target Sequence/siNA sense region
gaagccuagaguggaagca

SEQ ID NO: 211 - RNA, 19 nt, Artificial Sequence
  Synthetic Target Sequence/siNA sense region
accuaaacaagaggagcca

SEQ ID NO: 212 - RNA, 19 nt, Artificial Sequence
  Synthetic Target Sequence/siNA sense region
accaaacacagaagauucc

SEQ ID NO: 213 - RNA, 19 nt, Artificial Sequence
  Synthetic Target Sequence/siNA sense region
caaaacugaggagaaaucu

SEQ ID NO: 214 - RNA, 19 nt, Artificial Sequence
  Synthetic Target Sequence/siNA sense region
ugucguacagaagccuguc

SEQ ID NO: 215 - RNA, 19 nt, Artificial Sequence
  Synthetic Target Sequence/siNA sense region
cgaugugaagccaaaaauu

SEQ ID NO: 216 - RNA, 19 nt, Artificial Sequence
  Synthetic Target Sequence/siNA sense region
uaaggccugcauugaugag

SEQ ID NO: 217 - RNA, 19 nt, Artificial Sequence
  Synthetic Target Sequence/siNA sense region
gguuaccacaacacuggaa

SEQ ID NO: 218 - RNA, 19 nt, Artificial Sequence
  Synthetic Target Sequence/siNA sense region
agaaacuaaguuucuuacc

SEQ ID NO: 219 - RNA, 19 nt, Artificial Sequence
  Synthetic Target Sequence/siNA sense region
caauaaguuacucuuguuu

SEQ ID NO: 220 - RNA, 19 nt, Artificial Sequence
  Synthetic Target Sequence/siNA sense region
ugcugauaucaaugguaag

SEQ ID NO: 221 - RNA, 19 nt, Artificial Sequence
  Synthetic Target Sequence/siNA sense region
gcuuuaccaugauucucag

SEQ ID NO: 222 - RNA, 19 nt, Artificial Sequence
  Synthetic Target Sequence/siNA sense region
gaacaugcuuagaggugaa

SEQ ID NO: 223 - RNA, 19 nt, Artificial Sequence
  Synthetic Target Sequence/siNA sense region
agauaugucuuuccuugag

SEQ ID NO: 224 - RNA, 19 nt, Artificial Sequence
  Synthetic Target Sequence/siNA sense region
gaaggaugcaccuuacaug

SEQ ID NO: 225 - RNA, 19 nt, Artificial Sequence
  Synthetic Target Sequence/siNA sense region
gguaggugauguuaucacu

SEQ ID NO: 226 - RNA, 19 nt, Artificial Sequence
  Synthetic Target Sequence/siNA sense region
uaguggugauaucacuugu

SEQ ID NO: 227 - RNA, 19 nt, Artificial Sequence
  Synthetic Target Sequence/siNA sense region
uguuguaauacccuccaaa

SEQ ID NO: 228 - RNA, 19 nt, Artificial Sequence
  Synthetic Target Sequence/siNA sense region
aaaggcugguggcacuacu

SEQ ID NO: 229 - RNA, 19 nt, Artificial Sequence
  Synthetic Target Sequence/siNA sense region
ugagaugcucucaagagcu

SEQ ID NO: 230 - RNA, 19 nt, Artificial Sequence
  Synthetic Target Sequence/siNA sense region
uuugaagaaagugccaguu

SEQ ID NO: 231 - RNA, 19 nt, Artificial Sequence
  Synthetic Target Sequence/siNA sense region
ugaugaguauauaaccacg

SEQ ID NO: 232 - RNA, 19 nt, Artificial Sequence
  Synthetic Target Sequence/siNA sense region
guacccuggacaaggaugu

SEQ ID NO: 233 - RNA, 19 nt, Artificial Sequence
  Synthetic Target Sequence/siNA sense region
ugcugguuauacacuugag

SEQ ID NO: 234 - RNA, 19 nt, Artificial Sequence
  Synthetic Target Sequence/siNA sense region
ggaagcuaagacugcucuu

SEQ ID NO: 235 - RNA, 19 nt, Artificial Sequence
  Synthetic Target Sequence/siNA sense region
uaagaaaugcaaaucugca

SEQ ID NO: 236 - RNA, 19 nt, Artificial Sequence
  Synthetic Target Sequence/siNA sense region
auuuuauguacuaccuuca

SEQ ID NO: 237 - RNA, 19 nt, Artificial Sequence
  Synthetic Target Sequence/siNA sense region
agaagcaccuaaugcuaag

SEQ ID NO: 238 - RNA, 19 nt, Artificial Sequence
  Synthetic Target Sequence/siNA sense region
ggaagagauucuaggaacu

SEQ ID NO: 239 - RNA, 19 nt, Artificial Sequence
  Synthetic Target Sequence/siNA sense region
uguauccuggaauuugaga

SEQ ID NO: 240 - RNA, 19 nt, Artificial Sequence
  Synthetic Target Sequence/siNA sense region
agaaaugcuugcucaugcu

SEQ ID NO: 241 - RNA, 19 nt, Artificial Sequence
  Synthetic Target Sequence/siNA sense region
ugaagagacaagaaaauua

SEQ ID NO: 242 - RNA, 19 nt, Artificial Sequence
  Synthetic Target Sequence/siNA sense region
aaugccuauaugcauggau

SEQ ID NO: 243 - RNA, 19 nt, Artificial Sequence
  Synthetic Target Sequence/siNA sense region
uguuagagccauaauggca

SEQ ID NO: 244 - RNA, 19 nt, Artificial Sequence
  Synthetic Target Sequence/siNA sense region
aaccauccaacguaaguau

SEQ ID NO: 245 - RNA, 19 nt, Artificial Sequence
  Synthetic Target Sequence/siNA sense region
uaaaggaauuaaaauucaa

SEQ ID NO: 246 - RNA, 19 nt, Artificial Sequence
  Synthetic Target Sequence/siNA sense region
agagggcaucguugacuau

SEQ ID NO: 247 - RNA, 19 nt, Artificial Sequence
  Synthetic Target Sequence/siNA sense region
ugguguccgauucuucuuu

SEQ ID NO: 248 - RNA, 19 nt, Artificial Sequence
  Synthetic Target Sequence/siNA sense region
uuauacuaguaaagagccu

SEQ ID NO: 249 - RNA, 19 nt, Artificial Sequence
  Synthetic Target Sequence/siNA sense region
uguagcuucuauuauuacg

SEQ ID NO: 250 - RNA, 19 nt, Artificial Sequence
  Synthetic Target Sequence/siNA sense region
gaagcugaacucucuaaau

SEQ ID NO: 251 - RNA, 19 nt, Artificial Sequence
  Synthetic Target Sequence/siNA sense region
ugagccgcuugucacaaug

SEQ ID NO: 252 - RNA, 19 nt, Artificial Sequence
  Synthetic Target Sequence/siNA sense region
gccaauugguuaugugaca

SEQ ID NO: 253 - RNA, 19 nt, Artificial Sequence
  Synthetic Target Sequence/siNA sense region
acaugguuuuaaucuugaa

SEQ ID NO: 254 - RNA, 19 nt, Artificial Sequence
  Synthetic Target Sequence/siNA sense region
agaggcugcgcgcuguaug

SEQ ID NO: 255 - RNA, 19 nt, Artificial Sequence
  Synthetic Target Sequence/siNA sense region
gcguucucuuaaagcuccu

SEQ ID NO: 256 - RNA, 19 nt, Artificial Sequence
  Synthetic Target Sequence/siNA sense region
ugccguagugucaguauca

SEQ ID NO: 257 - RNA, 19 nt, Artificial Sequence
  Synthetic Target Sequence/siNA sense region
aucaccagaugcuguuacu

SEQ ID NO: 258 - RNA, 19 nt, Artificial Sequence
  Synthetic Target Sequence/siNA sense region
uacauauaauggauaccuc

SEQ ID NO: 259 - RNA, 19 nt, Artificial Sequence
  Synthetic Target Sequence/siNA sense region
cacuucgucaucaaagaca

SEQ ID NO: 260 - RNA, 19 nt, Artificial Sequence
  Synthetic Target Sequence/siNA sense region
aucugaggagcacuuugua

SEQ ID NO: 261 - RNA, 19 nt, Artificial Sequence
  Synthetic Target Sequence/siNA sense region
agaaacaguuucuuuggcu

SEQ ID NO: 262 - RNA, 19 nt, Artificial Sequence
  Synthetic Target Sequence/siNA sense region
uggcucuuacagagauugg

SEQ ID NO: 263 - RNA, 19 nt, Artificial Sequence
  Synthetic Target Sequence/siNA sense region
guccuauucaggacagcgu

SEQ ID NO: 264 - RNA, 19 nt, Artificial Sequence
  Synthetic Target Sequence/siNA sense region
uacagaguuagguguugaa

SEQ ID NO: 265 - RNA, 19 nt, Artificial Sequence
  Synthetic Target Sequence/siNA sense region
auuucuuaagcguggugac

SEQ ID NO: 266 - RNA, 19 nt, Artificial Sequence
  Synthetic Target Sequence/siNA sense region
caaaauuguguaccacacu

SEQ ID NO: 267 - RNA, 19 nt, Artificial Sequence
  Synthetic Target Sequence/siNA sense region
ucuggagagccccgucgag

SEQ ID NO: 268 - RNA, 19 nt, Artificial Sequence
  Synthetic Target Sequence/siNA sense region
guuucaucuugacggugag

SEQ ID NO: 269 - RNA, 19 nt, Artificial Sequence
  Synthetic Target Sequence/siNA sense region
gguucuuucacuugacaaa

SEQ ID NO: 270 - RNA, 19 nt, Artificial Sequence
  Synthetic Target Sequence/siNA sense region
acuaaagagucucuuaucc

SEQ ID NO: 271 - RNA, 19 nt, Artificial Sequence
  Synthetic Target Sequence/siNA sense region
ccugcgggagguuaagacu

SEQ ID NO: 272 - RNA, 19 nt, Artificial Sequence
  Synthetic Target Sequence/siNA sense region
uauaaaaguguucacaacu

SEQ ID NO: 273 - RNA, 19 nt, Artificial Sequence
  Synthetic Target Sequence/siNA sense region
uguggacaacacuaaucuc

SEQ ID NO: 274 - RNA, 19 nt, Artificial Sequence
  Synthetic Target Sequence/siNA sense region
ccacacacagcuuguggau

SEQ ID NO: 275 - RNA, 19 nt, Artificial Sequence
  Synthetic Target Sequence/siNA sense region
uaugucuaugacauaugga

SEQ ID NO: 276 - RNA, 19 nt, Artificial Sequence
  Synthetic Target Sequence/siNA sense region
acagcaguuugguccaaca

SEQ ID NO: 277 - RNA, 19 nt, Artificial Sequence
  Synthetic Target Sequence/siNA sense region
auacuuggauggugcugau

SEQ ID NO: 278 - RNA, 19 nt, Artificial Sequence
  Synthetic Target Sequence/siNA sense region
uguuacaaaaauuaaaccu

SEQ ID NO: 279 - RNA, 19 nt, Artificial Sequence
  Synthetic Target Sequence/siNA sense region
ucauguaaaucaugagggu

SEQ ID NO: 280 - RNA, 19 nt, Artificial Sequence
  Synthetic Target Sequence/siNA sense region
uaagacuuucuuuguacua

SEQ ID NO: 281 - RNA, 19 nt, Artificial Sequence
  Synthetic Target Sequence/siNA sense region
accuagugaugacacacua

SEQ ID NO: 282 - RNA, 19 nt, Artificial Sequence
  Synthetic Target Sequence/siNA sense region
acguagugaagcuuucgag

SEQ ID NO: 283 - RNA, 19 nt, Artificial Sequence
  Synthetic Target Sequence/siNA sense region
guacuaccauacucuugau

SEQ ID NO: 284 - RNA, 19 nt, Artificial Sequence
  Synthetic Target Sequence/siNA sense region
ugagaguuuucuugguagg

SEQ ID NO: 285 - RNA, 19 nt, Artificial Sequence
  Synthetic Target Sequence/siNA sense region
guacaugucugcuuuaaac

SEQ ID NO: 286 - RNA, 19 nt, Artificial Sequence
  Synthetic Target Sequence/siNA sense region
ccacacaaagaaauggaaa

SEQ ID NO: 287 - RNA, 19 nt, Artificial Sequence
  Synthetic Target Sequence/siNA sense region
auuuccucaaguugguggu

SEQ ID NO: 288 - RNA, 19 nt, Artificial Sequence
  Synthetic Target Sequence/siNA sense region
uuuaacuucaauuaaaugg

SEQ ID NO: 289 - RNA, 19 nt, Artificial Sequence
  Synthetic Target Sequence/siNA sense region
ggcugauaacaauuguuau

SEQ ID NO: 290 - RNA, 19 nt, Artificial Sequence
  Synthetic Target Sequence/siNA sense region
uuugucuaguguuuuauua

SEQ ID NO: 291 - RNA, 19 nt, Artificial Sequence
  Synthetic Target Sequence/siNA sense region
agcacuucaacagcuugaa

SEQ ID NO: 292 - RNA, 19 nt, Artificial Sequence
  Synthetic Target Sequence/siNA sense region
agucaaauucaaugcacca

SEQ ID NO: 293 - RNA, 19 nt, Artificial Sequence
  Synthetic Target Sequence/siNA sense region
agcacuucaagaggcuuau

SEQ ID NO: 294 - RNA, 19 nt, Artificial Sequence
  Synthetic Target Sequence/siNA sense region
uuauagagcccgugcuggu

SEQ ID NO: 295 - RNA, 19 nt, Artificial Sequence
  Synthetic Target Sequence/siNA sense region
ugaugcugcuaacuuuugu

SEQ ID NO: 296 - RNA, 19 nt, Artificial Sequence
  Synthetic Target Sequence/siNA sense region
ugcacucauacucgcuuac

SEQ ID NO: 297 - RNA, 19 nt, Artificial Sequence
  Synthetic Target Sequence/siNA sense region
caguaauaaaacuguuggc

SEQ ID NO: 298 - RNA, 19 nt, Artificial Sequence
  Synthetic Target Sequence/siNA sense region
cgagcuuggugaugucaga

SEQ ID NO: 299 - RNA, 19 nt, Artificial Sequence
  Synthetic Target Sequence/siNA sense region
agaaacuaugacccaucuu

SEQ ID NO: 300 - RNA, 19 nt, Artificial Sequence
  Synthetic Target Sequence/siNA sense region
ucuacagcaugcuaauuug

SEQ ID NO: 301 - RNA, 19 nt, Artificial Sequence
  Synthetic Target Sequence/siNA sense region
ggaaucugcaaagcgaguu

SEQ ID NO: 302 - RNA, 19 nt, Artificial Sequence
  Synthetic Target Sequence/siNA sense region
ucuuaaugugguguguaaa

SEQ ID NO: 303 - RNA, 19 nt, Artificial Sequence
  Synthetic Target Sequence/siNA sense region
acauuguggucagaaaacu

SEQ ID NO: 304 - RNA, 19 nt, Artificial Sequence
  Synthetic Target Sequence/siNA sense region
uacuaccuuaacgggugua

SEQ ID NO: 305 - RNA, 19 nt, Artificial Sequence
  Synthetic Target Sequence/siNA sense region
agaagcugugauguauaug

SEQ ID NO: 306 - RNA, 19 nt, Artificial Sequence
  Synthetic Target Sequence/siNA sense region
ggguacucuaucuuaugau

SEQ ID NO: 307 - RNA, 19 nt, Artificial Sequence
  Synthetic Target Sequence/siNA sense region
uaaucuuaagacagguguu

SEQ ID NO: 308 - RNA, 19 nt, Artificial Sequence
  Synthetic Target Sequence/siNA sense region
uuccauuccaugugugugu

SEQ ID NO: 309 - RNA, 19 nt, Artificial Sequence
  Synthetic Target Sequence/siNA sense region
uggucgugaugcuacacaa

SEQ ID NO: 310 - RNA, 19 nt, Artificial Sequence
  Synthetic Target Sequence/siNA sense region
auaucuaguacaacaagag

SEQ ID NO: 311 - RNA, 19 nt, Artificial Sequence
  Synthetic Target Sequence/siNA sense region
gucuucuuuuguuaugaug

SEQ ID NO: 312 - RNA, 19 nt, Artificial Sequence
  Synthetic Target Sequence/siNA sense region
gucugcaccaccugcugag

SEQ ID NO: 313 - RNA, 19 nt, Artificial Sequence
  Synthetic Target Sequence/siNA sense region
guauaaauuacagcaaggu

SEQ ID NO: 314 - RNA, 19 nt, Artificial Sequence
  Synthetic Target Sequence/siNA sense region
uacauucuuaugugcgaau

SEQ ID NO: 315 - RNA, 19 nt, Artificial Sequence
  Synthetic Target Sequence/siNA sense region
ugaguacacugguaacuau

SEQ ID NO: 316 - RNA, 19 nt, Artificial Sequence
  Synthetic Target Sequence/siNA sense region
ucaguguggucauuacacu

SEQ ID NO: 317 - RNA, 19 nt, Artificial Sequence
  Synthetic Target Sequence/siNA sense region
ucauauaacugcuaaggag

SEQ ID NO: 318 - RNA, 19 nt, Artificial Sequence
  Synthetic Target Sequence/siNA sense region
gacccucuaucguauugac

SEQ ID NO: 319 - RNA, 19 nt, Artificial Sequence
  Synthetic Target Sequence/siNA sense region
cggagcucaccuuacaaag

SEQ ID NO: 320 - RNA, 19 nt, Artificial Sequence
  Synthetic Target Sequence/siNA sense region
gaugucagaguacaaagga

SEQ ID NO: 321 - RNA, 19 nt, Artificial Sequence
  Synthetic Target Sequence/siNA sense region
accagugacugauguuuuc

SEQ ID NO: 322 - RNA, 19 nt, Artificial Sequence
  Synthetic Target Sequence/siNA sense region
cuacaaggaaacaucuuac

SEQ ID NO: 323 - RNA, 19 nt, Artificial Sequence
  Synthetic Target Sequence/siNA sense region
cacuacaaccaucaagccu

SEQ ID NO: 324 - RNA, 19 nt, Artificial Sequence
  Synthetic Target Sequence/siNA sense region
ugugucguauaaacucgau

SEQ ID NO: 325 - RNA, 19 nt, Artificial Sequence
  Synthetic Target Sequence/siNA sense region
uggaguuacuuacacagag

SEQ ID NO: 326 - RNA, 19 nt, Artificial Sequence
  Synthetic Target Sequence/siNA sense region
gauugaaccaaaauuggau

SEQ ID NO: 327 - RNA, 19 nt, Artificial Sequence
  Synthetic Target Sequence/siNA sense region
uggguauuauaaaaaggau

SEQ ID NO: 328 - RNA, 19 nt, Artificial Sequence
  Synthetic Target Sequence/siNA sense region
uaaugcuuacuauacagag

SEQ ID NO: 329 - RNA, 19 nt, Artificial Sequence
  Synthetic Target Sequence/siNA sense region
gcagccuauagaccuugua

SEQ ID NO: 330 - RNA, 19 nt, Artificial Sequence
  Synthetic Target Sequence/siNA sense region
accaacucaaccauuacca

SEQ ID NO: 331 - RNA, 19 nt, Artificial Sequence
  Synthetic Target Sequence/siNA sense region
aaaugcgaguuuugauaau

SEQ ID NO: 332 - RNA, 19 nt, Artificial Sequence
  Synthetic Target Sequence/siNA sense region
uuucaaacucacauguucu

SEQ ID NO: 333 - RNA, 19 nt, Artificial Sequence
  Synthetic Target Sequence/siNA sense region
uaacacaaaauuugcugau

SEQ ID NO: 334 - RNA, 19 nt, Artificial Sequence
  Synthetic Target Sequence/siNA sense region
ugauuuaaaucaaaugaca

SEQ ID NO: 335 - RNA, 19 nt, Artificial Sequence
  Synthetic Target Sequence/siNA sense region
aggcuucacaaagccagcu

SEQ ID NO: 336 - RNA, 19 nt, Artificial Sequence
  Synthetic Target Sequence/siNA sense region
uucacgagagcuaucuguc

SEQ ID NO: 337 - RNA, 19 nt, Artificial Sequence
  Synthetic Target Sequence/siNA sense region
cacauucuucccagacuug

SEQ ID NO: 338 - RNA, 19 nt, Artificial Sequence
  Synthetic Target Sequence/siNA sense region
gaauggcgauguaguggcu

SEQ ID NO: 339 - RNA, 19 nt, Artificial Sequence
  Synthetic Target Sequence/siNA sense region
uauugacuauagacacuau

SEQ ID NO: 340 - RNA, 19 nt, Artificial Sequence
  Synthetic Target Sequence/siNA sense region
uucagcgaguuucaagaaa

SEQ ID NO: 341 - RNA, 19 nt, Artificial Sequence
  Synthetic Target Sequence/siNA sense region
aggugcuaaauuacugcau

SEQ ID NO: 342 - RNA, 19 nt, Artificial Sequence
  Synthetic Target Sequence/siNA sense region
uaagccaauuguuuggcac

SEQ ID NO: 343 - RNA, 19 nt, Artificial Sequence
  Synthetic Target Sequence/siNA sense region
cauuaaccaggcuacaacc

SEQ ID NO: 344 - RNA, 19 nt, Artificial Sequence
  Synthetic Target Sequence/siNA sense region
caagacaacguucaaacca

SEQ ID NO: 345 - RNA, 19 nt, Artificial Sequence
  Synthetic Target Sequence/siNA sense region
aaacacuugguguuuacgu

SEQ ID NO: 346 - RNA, 19 nt, Artificial Sequence
  Synthetic Target Sequence/siNA sense region
uugucuuuggaguacaaag

SEQ ID NO: 347 - RNA, 19 nt, Artificial Sequence
  Synthetic Target Sequence/siNA sense region
gccaguagauacuucaaau

SEQ ID NO: 348 - RNA, 19 nt, Artificial Sequence
  Synthetic Target Sequence/siNA sense region
uucauuugaaguucuggca

SEQ ID NO: 349 - RNA, 19 nt, Artificial Sequence
  Synthetic Target Sequence/siNA sense region
aguagaagacacacaagga

SEQ ID NO: 350 - RNA, 19 nt, Artificial Sequence
  Synthetic Target Sequence/siNA sense region
aauggacaaucuugcuugu

SEQ ID NO: 351 - RNA, 19 nt, Artificial Sequence
  Synthetic Target Sequence/siNA sense region
ugaaagucaacaacccacc

SEQ ID NO: 352 - RNA, 19 nt, Artificial Sequence
  Synthetic Target Sequence/siNA sense region
cucugaagaaguaguggaa

SEQ ID NO: 353 - RNA, 19 nt, Artificial Sequence
  Synthetic Target Sequence/siNA sense region
aaauccuaccauacagaag

SEQ ID NO: 354 - RNA, 19 nt, Artificial Sequence
  Synthetic Target Sequence/siNA sense region
ggaagucauagagugugac

SEQ ID NO: 355 - RNA, 19 nt, Artificial Sequence
  Synthetic Target Sequence/siNA sense region
cgugaaaacuaccgaaguu

SEQ ID NO: 356 - RNA, 19 nt, Artificial Sequence
  Synthetic Target Sequence/siNA sense region
uguaggcaaugucauacuu

SEQ ID NO: 357 - RNA, 19 nt, Artificial Sequence
  Synthetic Target Sequence/siNA sense region
uaaaccaucagaugaaggu

SEQ ID NO: 358 - RNA, 19 nt, Artificial Sequence
  Synthetic Target Sequence/siNA sense region
uguuaaaguaacacaagag

SEQ ID NO: 359 - RNA, 19 nt, Artificial Sequence
  Synthetic Target Sequence/siNA sense region
guuaggucaugaggaucuu

SEQ ID NO: 360 - RNA, 19 nt, Artificial Sequence
  Synthetic Target Sequence/siNA sense region
uauggcugcuuauguggaa

SEQ ID NO: 361 - RNA, 19 nt, Artificial Sequence
  Synthetic Target Sequence/siNA sense region
aaacacaagcauuaccauu

SEQ ID NO: 362 - RNA, 19 nt, Artificial Sequence
  Synthetic Target Sequence/siNA sense region
uaagaaaccuaaugagcuu

SEQ ID NO: 363 - RNA, 19 nt, Artificial Sequence
  Synthetic Target Sequence/siNA sense region
uucacuagccuuagguuua

SEQ ID NO: 364 - RNA, 19 nt, Artificial Sequence
  Synthetic Target Sequence/siNA sense region
aaaaacaauugccacucau

SEQ ID NO: 365 - RNA, 19 nt, Artificial Sequence
  Synthetic Target Sequence/siNA sense region
ugguauugcugcaauuaau

SEQ ID NO: 366 - RNA, 19 nt, Artificial Sequence
  Synthetic Target Sequence/siNA sense region
uaguguuccuuggaguaaa

SEQ ID NO: 367 - RNA, 19 nt, Artificial Sequence
  Synthetic Target Sequence/siNA sense region
aauuuuggcuuaugucaaa

SEQ ID NO: 368 - RNA, 19 nt, Artificial Sequence
  Synthetic Target Sequence/siNA sense region
accauucuuaggacaagca

SEQ ID NO: 369 - RNA, 19 nt, Artificial Sequence
  Synthetic Target Sequence/siNA sense region
agcaauuacaacaucaaau

SEQ ID NO: 370 - RNA, 19 nt, Artificial Sequence
  Synthetic Target Sequence/siNA sense region
uugcgcuaagagauuagca

SEQ ID NO: 371 - RNA, 19 nt, Artificial Sequence
  Synthetic Target Sequence/siNA sense region
acaacguguguuuaacaau

SEQ ID NO: 372 - RNA, 19 nt, Artificial Sequence
  Synthetic Target Sequence/siNA sense region
uuauaugccuuauguguuu

SEQ ID NO: 373 - RNA, 19 nt, Artificial Sequence
  Synthetic Target Sequence/siNA sense region
uacauuauuguuccaauug

SEQ ID NO: 374 - RNA, 19 nt, Artificial Sequence
  Synthetic Target Sequence/siNA sense region
guguacuuuuacuaaaagu

SEQ ID NO: 375 - RNA, 19 nt, Artificial Sequence
  Synthetic Target Sequence/siNA sense region
uaccaauucuagaauuaga

SEQ ID NO: 376 - RNA, 19 nt, Artificial Sequence
  Synthetic Target Sequence/siNA sense region
agcuucacuaccuacaacu

SEQ ID NO: 377 - RNA, 19 nt, Artificial Sequence
  Synthetic Target Sequence/siNA sense region
uauugcuaaaaauaguguu

SEQ ID NO: 378 - RNA, 19 nt, Artificial Sequence
  Synthetic Target Sequence/siNA sense region
uaagaguguugcuaaauua

SEQ ID NO: 379 - RNA, 19 nt, Artificial Sequence
  Synthetic Target Sequence/siNA sense region
auguuuggaugccggcauu

SEQ ID NO: 380 - RNA, 19 nt, Artificial Sequence
  Synthetic Target Sequence/siNA sense region
uaauuaugugaagucaccc

SEQ ID NO: 381 - RNA, 19 nt, Artificial Sequence
  Synthetic Target Sequence/siNA sense region
caaauuuucuaaauuguuc

SEQ ID NO: 382 - RNA, 19 nt, Artificial Sequence
  Synthetic Target Sequence/siNA sense region
cacaaucgcuauguggcua

SEQ ID NO: 383 - RNA, 19 nt, Artificial Sequence
  Synthetic Target Sequence/siNA sense region
auuguuguuaaguauuugc

SEQ ID NO: 384 - RNA, 19 nt, Artificial Sequence
  Synthetic Target Sequence/siNA sense region
cuuagguucucuaaucugu

SEQ ID NO: 385 - RNA, 19 nt, Artificial Sequence
  Synthetic Target Sequence/siNA sense region
uguaacugcugcuuuuggu

SEQ ID NO: 386 - RNA, 19 nt, Artificial Sequence
  Synthetic Target Sequence/siNA sense region
uguacucuuaucuaauuuu

SEQ ID NO: 387 - RNA, 19 nt, Artificial Sequence
  Synthetic Target Sequence/siNA sense region
uggugcuccuucuuauugu

SEQ ID NO: 388 - RNA, 19 nt, Artificial Sequence
  Synthetic Target Sequence/siNA sense region
uaauggcguuagagaauug

SEQ ID NO: 389 - RNA, 19 nt, Artificial Sequence
  Synthetic Target Sequence/siNA sense region
guaucuuaauucgucuaac

SEQ ID NO: 390 - RNA, 19 nt, Artificial Sequence
  Synthetic Target Sequence/siNA sense region
cguuacuacuauggauuuc

SEQ ID NO: 391 - RNA, 19 nt, Artificial Sequence
  Synthetic Target Sequence/siNA sense region
cugugaagguucuuuuccu

SEQ ID NO: 392 - RNA, 19 nt, Artificial Sequence
  Synthetic Target Sequence/siNA sense region
uugcagcauuuguuuaagu

SEQ ID NO: 393 - RNA, 19 nt, Artificial Sequence
  Synthetic Target Sequence/siNA sense region
uggauuagacucccuugau

SEQ ID NO: 394 - RNA, 19 nt, Artificial Sequence
  Synthetic Target Sequence/siNA sense region
uucuuauccagcucuugaa

SEQ ID NO: 395 - RNA, 19 nt, Artificial Sequence
  Synthetic Target Sequence/siNA sense region
aaccauucaggugacgauu

SEQ ID NO: 396 - RNA, 19 nt, Artificial Sequence
  Synthetic Target Sequence/siNA sense region
uucaucguacaagcuagac

SEQ ID NO: 397 - RNA, 19 nt, Artificial Sequence
  Synthetic Target Sequence/siNA sense region
cuugacaauuuuaggucug

SEQ ID NO: 398 - RNA, 19 nt, Artificial Sequence
  Synthetic Target Sequence/siNA sense region
ggccgcugaguggguuuug

SEQ ID NO: 399 - RNA, 19 nt, Artificial Sequence
  Synthetic Target Sequence/siNA sense region
ggcauauauguuguucaca

SEQ ID NO: 400 - RNA, 19 nt, Artificial Sequence
  Synthetic Target Sequence/siNA sense region
aaaauucuuuuauuuauua

SEQ ID NO: 401 - RNA, 19 nt, Artificial Sequence
  Synthetic Target Sequence/siNA sense region
aggucuuucagcuauaaug

SEQ ID NO: 402 - RNA, 19 nt, Artificial Sequence
  Synthetic Target Sequence/siNA sense region
gcagguguucuuuggcuau

SEQ ID NO: 403 - RNA, 19 nt, Artificial Sequence
  Synthetic Target Sequence/siNA sense region
uuuugcuagucauuucauc

SEQ ID NO: 404 - RNA, 19 nt, Artificial Sequence
  Synthetic Target Sequence/siNA sense region
cagcaauucuuggcucaug

SEQ ID NO: 405 - RNA, 19 nt, Artificial Sequence
  Synthetic Target Sequence/siNA sense region
gugguuuaucauuaguauu

SEQ ID NO: 406 - RNA, 19 nt, Artificial Sequence
  Synthetic Target Sequence/siNA sense region
uguacaaauggcacccguu

SEQ ID NO: 407 - RNA, 19 nt, Artificial Sequence
  Synthetic Target Sequence/siNA sense region
uucugcaaugguuaggaug

SEQ ID NO: 408 - RNA, 19 nt, Artificial Sequence
  Synthetic Target Sequence/siNA sense region
guacaucuucuuugcuucu

SEQ ID NO: 409 - RNA, 19 nt, Artificial Sequence
  Synthetic Target Sequence/siNA sense region
uuucuacuacauauggaag

SEQ ID NO: 410 - RNA, 19 nt, Artificial Sequence
  Synthetic Target Sequence/siNA sense region
gagcuauguucauaucaug

SEQ ID NO: 411 - RNA, 19 nt, Artificial Sequence
  Synthetic Target Sequence/siNA sense region
ggaugguugcaccucuucg

SEQ ID NO: 412 - RNA, 19 nt, Artificial Sequence
  Synthetic Target Sequence/siNA sense region
gacuugcaugaugugcuau

SEQ ID NO: 413 - RNA, 19 nt, Artificial Sequence
  Synthetic Target Sequence/siNA sense region
uaagcgcaaucgugccaca

SEQ ID NO: 414 - RNA, 19 nt, Artificial Sequence
  Synthetic Target Sequence/siNA sense region
acgcguugaguguacaacu

SEQ ID NO: 415 - RNA, 19 nt, Artificial Sequence
  Synthetic Target Sequence/siNA sense region
uauuguuaauggcaugaag

SEQ ID NO: 416 - RNA, 19 nt, Artificial Sequence
  Synthetic Target Sequence/siNA sense region
gagaucuuucuaugucuau

SEQ ID NO: 417 - RNA, 19 nt, Artificial Sequence
  Synthetic Target Sequence/siNA sense region
ugcaaauggaggccguggc

SEQ ID NO: 418 - RNA, 19 nt, Artificial Sequence
  Synthetic Target Sequence/siNA sense region
cuucugcaagacucacaau

SEQ ID NO: 419 - RNA, 19 nt, Artificial Sequence
  Synthetic Target Sequence/siNA sense region
uuggaauugucucaauugu

SEQ ID NO: 420 - RNA, 19 nt, Artificial Sequence
  Synthetic Target Sequence/siNA sense region
ugacacauuuugcacuggu

SEQ ID NO: 421 - RNA, 19 nt, Artificial Sequence
  Synthetic Target Sequence/siNA sense region
uaguacauucauuagugau

SEQ ID NO: 422 - RNA, 19 nt, Artificial Sequence
  Synthetic Target Sequence/siNA sense region
ugaaguugcucgugauuug

SEQ ID NO: 423 - RNA, 19 nt, Artificial Sequence
  Synthetic Target Sequence/siNA sense region
gucacuccaguuuaaaaga

SEQ ID NO: 424 - RNA, 19 nt, Artificial Sequence
  Synthetic Target Sequence/siNA sense region
accaaucaacccuacugac

SEQ ID NO: 425 - RNA, 19 nt, Artificial Sequence
  Synthetic Target Sequence/siNA sense region
ccagucaucguauauuguu

SEQ ID NO: 426 - RNA, 19 nt, Artificial Sequence
  Synthetic Target Sequence/siNA sense region
ugauaguguugcugugaaa

SEQ ID NO: 427 - RNA, 19 nt, Artificial Sequence
  Synthetic Target Sequence/siNA sense region
aaauggcgcgcuucaccuc

SEQ ID NO: 428 - RNA, 19 nt, Artificial Sequence
  Synthetic Target Sequence/siNA sense region
cuacuuugacaaggcuggu

SEQ ID NO: 429 - RNA, 19 nt, Artificial Sequence
  Synthetic Target Sequence/siNA sense region
ucaaaagaccuaugagaga

SEQ ID NO: 430 - RNA, 19 nt, Artificial Sequence
  Synthetic Target Sequence/siNA sense region
acauccgcucucccauuuu

SEQ ID NO: 431 - RNA, 19 nt, Artificial Sequence
  Synthetic Target Sequence/siNA sense region
ugucaauuuagacaauuug

SEQ ID NO: 432 - RNA, 19 nt, Artificial Sequence
  Synthetic Target Sequence/siNA sense region
gagagcuaacaacacuaaa

SEQ ID NO: 433 - RNA, 19 nt, Artificial Sequence
  Synthetic Target Sequence/siNA sense region
agguucacugccuauuaau

SEQ ID NO: 434 - RNA, 19 nt, Artificial Sequence
  Synthetic Target Sequence/siNA sense region
ugucauaguuuuugauggc

SEQ ID NO: 435 - RNA, 19 nt, Artificial Sequence
  Synthetic Target Sequence/siNA sense region
caaguccaaaugcgacgag

SEQ ID NO: 436 - RNA, 19 nt, Artificial Sequence
  Synthetic Target Sequence/siNA sense region
gucugcuucuaagucugcu

SEQ ID NO: 437 - RNA, 19 nt, Artificial Sequence
  Synthetic Target Sequence/siNA sense region
uucuguguacuacagucag

SEQ ID NO: 438 - RNA, 19 nt, Artificial Sequence
  Synthetic Target Sequence/siNA sense region
gcugaugugccaaccuauu

SEQ ID NO: 439 - RNA, 19 nt, Artificial Sequence
  Synthetic Target Sequence/siNA sense region
ucuguugcuugaccaagcu

SEQ ID NO: 440 - RNA, 19 nt, Artificial Sequence
  Synthetic Target Sequence/siNA sense region
ucuuguaucagacguugga

SEQ ID NO: 441 - RNA, 19 nt, Artificial Sequence
  Synthetic Target Sequence/siNA sense region
agauaguacugaaguuucc

SEQ ID NO: 442 - RNA, 19 nt, Artificial Sequence
  Synthetic Target Sequence/siNA sense region
cguuaagauguuugaugcu

SEQ ID NO: 443 - RNA, 19 nt, Artificial Sequence
  Synthetic Target Sequence/siNA sense region
uuaugucgacaccuuuuca

SEQ ID NO: 444 - RNA, 19 nt, Artificial Sequence
  Synthetic Target Sequence/siNA sense region
agcaacuuuuaguguuccu

SEQ ID NO: 445 - RNA, 19 nt, Artificial Sequence
  Synthetic Target Sequence/siNA sense region
uauggaaaaacuuaaggca

SEQ ID NO: 446 - RNA, 19 nt, Artificial Sequence
  Synthetic Target Sequence/siNA sense region
acuuguugcuacagcucac

SEQ ID NO: 447 - RNA, 19 nt, Artificial Sequence
  Synthetic Target Sequence/siNA sense region
cagcgaguuagcaaagggu

SEQ ID NO: 448 - RNA, 19 nt, Artificial Sequence
  Synthetic Target Sequence/siNA sense region
uguagcuuuagaugguguc

SEQ ID NO: 449 - RNA, 19 nt, Artificial Sequence
  Synthetic Target Sequence/siNA sense region
ccuuucuacauucguguca

SEQ ID NO: 450 - RNA, 19 nt, Artificial Sequence
  Synthetic Target Sequence/siNA sense region
agcugcccgacaagguguu

SEQ ID NO: 451 - RNA, 19 nt, Artificial Sequence
  Synthetic Target Sequence/siNA sense region
uguugauaccgauguugac

SEQ ID NO: 452 - RNA, 19 nt, Artificial Sequence
  Synthetic Target Sequence/siNA sense region
cacaaaggauguuauugaa

SEQ ID NO: 453 - RNA, 19 nt, Artificial Sequence
  Synthetic Target Sequence/siNA sense region
augucucaaacuuucacau

SEQ ID NO: 454 - RNA, 19 nt, Artificial Sequence
  Synthetic Target Sequence/siNA sense region
ucacucugacuuagaagug

SEQ ID NO: 455 - RNA, 19 nt, Artificial Sequence
  Synthetic Target Sequence/siNA sense region
gacaggugacaguuguaac

SEQ ID NO: 456 - RNA, 19 nt, Artificial Sequence
  Synthetic Target Sequence/siNA sense region
caauuucaugcucaccuau

SEQ ID NO: 457 - RNA, 19 nt, Artificial Sequence
  Synthetic Target Sequence/siNA sense region
uaauaagguugaaaacaug

SEQ ID NO: 458 - RNA, 19 nt, Artificial Sequence
  Synthetic Target Sequence/siNA sense region
gacgcccagagaucuuggc

SEQ ID NO: 459 - RNA, 19 nt, Artificial Sequence
  Synthetic Target Sequence/siNA sense region
cgcauguauugacuguaau

SEQ ID NO: 460 - RNA, 19 nt, Artificial Sequence
  Synthetic Target Sequence/siNA sense region
ugcaaggcauaucaaugcc

SEQ ID NO: 461 - RNA, 19 nt, Artificial Sequence
  Synthetic Target Sequence/siNA sense region
ccaaguagcaaaaagucac

SEQ ID NO: 462 - RNA, 19 nt, Artificial Sequence
  Synthetic Target Sequence/siNA sense region
caauguuucacucaucugg

SEQ ID NO: 463 - RNA, 19 nt, Artificial Sequence
  Synthetic Target Sequence/siNA sense region
gaauguaaaagacuacaug

SEQ ID NO: 464 - RNA, 19 nt, Artificial Sequence
  Synthetic Target Sequence/siNA sense region
gucuuuaucugaacagcug

SEQ ID NO: 465 - RNA, 19 nt, Artificial Sequence
  Synthetic Target Sequence/siNA sense region
gcguaaacaaauucguagu

SEQ ID NO: 466 - RNA, 19 nt, Artificial Sequence
  Synthetic Target Sequence/siNA sense region
ugcugccaagaagaacaac

SEQ ID NO: 467 - RNA, 19 nt, Artificial Sequence
  Synthetic Target Sequence/siNA sense region
cauaccuuuuagacuaacu

SEQ ID NO: 468 - RNA, 19 nt, Artificial Sequence
  Synthetic Target Sequence/siNA sense region
uugugcuacaacuagacag

SEQ ID NO: 469 - RNA, 19 nt, Artificial Sequence
  Synthetic Target Sequence/siNA sense region
gguugucaaugucauaacu

SEQ ID NO: 470 - RNA, 19 nt, Artificial Sequence
  Synthetic Target Sequence/siNA sense region
uacuaaaaucucacucaag

SEQ ID NO: 471 - RNA, 19 nt, Artificial Sequence
  Synthetic Target Sequence/siNA sense region
gggugguaagauuguuagu

SEQ ID NO: 472 - RNA, 19 nt, Artificial Sequence
  Synthetic Target Sequence/siNA sense region
uacuuguuuuaaacuuaug

SEQ ID NO: 473 - RNA, 19 nt, Artificial Sequence
  Synthetic Target Sequence/siNA sense region
gcuuaaggccacauuauug

SEQ ID NO: 474 - RNA, 19 nt, Artificial Sequence
  Synthetic Target Sequence/siNA sense region
gugcguucuugcugcauug

SEQ ID NO: 475 - RNA, 19 nt, Artificial Sequence
  Synthetic Target Sequence/siNA sense region
gguuuguuauaucguuaug

SEQ ID NO: 476 - RNA, 19 nt, Artificial Sequence
  Synthetic Target Sequence/siNA sense region
gccaguacauacauuguca

SEQ ID NO: 477 - RNA, 19 nt, Artificial Sequence
  Synthetic Target Sequence/siNA sense region
aauccaugaugguuacaca

SEQ ID NO: 478 - RNA, 19 nt, Artificial Sequence
  Synthetic Target Sequence/siNA sense region
aaaugaaaucauugguuac

SEQ ID NO: 479 - RNA, 19 nt, Artificial Sequence
  Synthetic Target Sequence/siNA sense region
caaagccauucaggauggu

SEQ ID NO: 480 - RNA, 19 nt, Artificial Sequence
  Synthetic Target Sequence/siNA sense region
ugucacucgugacaucauu

SEQ ID NO: 481 - RNA, 19 nt, Artificial Sequence
  Synthetic Target Sequence/siNA sense region
uucuacugaugauuguuuu

SEQ ID NO: 482 - RNA, 19 nt, Artificial Sequence
  Synthetic Target Sequence/siNA sense region
ugcaaauaaacaugcuggu

SEQ ID NO: 483 - RNA, 19 nt, Artificial Sequence
  Synthetic Target Sequence/siNA sense region
uuuugacgcaugguuuagc

SEQ ID NO: 484 - RNA, 19 nt, Artificial Sequence
  Synthetic Target Sequence/siNA sense region
ccagcguggugguucauac

SEQ ID NO: 485 - RNA, 19 nt, Artificial Sequence
  Synthetic Target Sequence/siNA sense region
caaaaaugacaaaagcugc

SEQ ID NO: 486 - RNA, 19 nt, Artificial Sequence
  Synthetic Target Sequence/siNA sense region
cccuguaguagcugcuauc

SEQ ID NO: 487 - RNA, 19 nt, Artificial Sequence
  Synthetic Target Sequence/siNA sense region
cauuacaagagagauuggu

SEQ ID NO: 488 - RNA, 19 nt, Artificial Sequence
  Synthetic Target Sequence/siNA sense region
uuucauagugccuggcuua

SEQ ID NO: 489 - RNA, 19 nt, Artificial Sequence
  Synthetic Target Sequence/siNA sense region
accggguacugugcugaga

SEQ ID NO: 490 - RNA, 19 nt, Artificial Sequence
  Synthetic Target Sequence/siNA sense region
agcaaucaauggugacuuc

SEQ ID NO: 491 - RNA, 19 nt, Artificial Sequence
  Synthetic Target Sequence/siNA sense region
cuugcauuuucuaccucgu

SEQ ID NO: 492 - RNA, 19 nt, Artificial Sequence
  Synthetic Target Sequence/siNA sense region
uguuuuuagugcuguuggc

SEQ ID NO: 493 - RNA, 19 nt, Artificial Sequence
  Synthetic Target Sequence/siNA sense region
caacauuugcuacacaccu

SEQ ID NO: 494 - RNA, 19 nt, Artificial Sequence
  Synthetic Target Sequence/siNA sense region
uuccaaacucauugaguau

SEQ ID NO: 495 - RNA, 19 nt, Artificial Sequence
  Synthetic Target Sequence/siNA sense region
uagugauuuugcuaccucu

SEQ ID NO: 496 - RNA, 19 nt, Artificial Sequence
  Synthetic Target Sequence/siNA sense region
ugcuugcguucuugcugcu

SEQ ID NO: 497 - RNA, 19 nt, Artificial Sequence
  Synthetic Target Sequence/siNA sense region
ugaguguacaauuuuuaag

SEQ ID NO: 498 - RNA, 19 nt, Artificial Sequence
  Synthetic Target Sequence/siNA sense region
ggaugcuaugggcaaaccu

SEQ ID NO: 499 - RNA, 19 nt, Artificial Sequence
  Synthetic Target Sequence/siNA sense region
ugugccauauuguuaugac

SEQ ID NO: 500 - RNA, 19 nt, Artificial Sequence
  Synthetic Target Sequence/siNA sense region
cacuaauuugcuagagggu

SEQ ID NO: 501 - RNA, 19 nt, Artificial Sequence
  Synthetic Target Sequence/siNA sense region
uucuauuucuuauagugag

SEQ ID NO: 502 - RNA, 19 nt, Artificial Sequence
  Synthetic Target Sequence/siNA sense region
gcuucguccagacacucgu

SEQ ID NO: 503 - RNA, 19 nt, Artificial Sequence
  Synthetic Target Sequence/siNA sense region
uuaugugcuuauggauggu

SEQ ID NO: 504 - RNA, 19 nt, Artificial Sequence
  Synthetic Target Sequence/siNA sense region
uuccaucauacaguuuccu

SEQ ID NO: 505 - RNA, 19 nt, Artificial Sequence
  Synthetic Target Sequence/siNA sense region
uaacacuuaccuggagggu

SEQ ID NO: 506 - RNA, 19 nt, Artificial Sequence
  Synthetic Target Sequence/siNA sense region
uucuguuagaguaguaaca

SEQ ID NO: 507 - RNA, 19 nt, Artificial Sequence
  Synthetic Target Sequence/siNA sense region
aacuuuugaugcugaguac

SEQ ID NO: 508 - RNA, 19 nt, Artificial Sequence
  Synthetic Target Sequence/siNA sense region
cuguagacaugguacaugc

SEQ ID NO: 509 - RNA, 19 nt, Artificial Sequence
  Synthetic Target Sequence/siNA sense region
cgaaaggucagaaguaggu

SEQ ID NO: 510 - RNA, 19 nt, Artificial Sequence
  Synthetic Target Sequence/siNA sense region
uauuugccuaucuaccagu

SEQ ID NO: 511 - RNA, 19 nt, Artificial Sequence
  Synthetic Target Sequence/siNA sense region
ugguagauggguucuuaau

SEQ ID NO: 512 - RNA, 19 nt, Artificial Sequence
  Synthetic Target Sequence/siNA sense region
uaaugagcauuacagagcu

SEQ ID NO: 513 - RNA, 19 nt, Artificial Sequence
  Synthetic Target Sequence/siNA sense region
ucuaucaggaguuuucugu

SEQ ID NO: 514 - RNA, 19 nt, Artificial Sequence
  Synthetic Target Sequence/siNA sense region
ugguguugaugcgaugaau

SEQ ID NO: 515 - RNA, 19 nt, Artificial Sequence
  Synthetic Target Sequence/siNA sense region
ucucauagcuaacaucuuu

SEQ ID NO: 516 - RNA, 19 nt, Artificial Sequence
  Synthetic Target Sequence/siNA sense region
uacuccucuugugcaaccu

SEQ ID NO: 517 - RNA, 19 nt, Artificial Sequence
  Synthetic Target Sequence/siNA sense region
ugugggugcuuuagaugug

SEQ ID NO: 518 - RNA, 19 nt, Artificial Sequence
  Synthetic Target Sequence/siNA sense region
gucugcuucaguaguggcu

SEQ ID NO: 519 - RNA, 19 nt, Artificial Sequence
  Synthetic Target Sequence/siNA sense region
uggugguauuauugccaua

SEQ ID NO: 520 - RNA, 19 nt, Artificial Sequence
  Synthetic Target Sequence/siNA sense region
auuggugacuugugcugcc

SEQ ID NO: 521 - RNA, 19 nt, Artificial Sequence
  Synthetic Target Sequence/siNA sense region
cuacuacuuuaugaaauuc

SEQ ID NO: 522 - RNA, 19 nt, Artificial Sequence
  Synthetic Target Sequence/siNA sense region
cagacguguuuuuggugag

SEQ ID NO: 523 - RNA, 19 nt, Artificial Sequence
  Synthetic Target Sequence/siNA sense region
guacaaccauguuguugcu

SEQ ID NO: 524 - RNA, 19 nt, Artificial Sequence
  Synthetic Target Sequence/siNA sense region
ugcuaaugcacuuuuguuu

SEQ ID NO: 525 - RNA, 19 nt, Artificial Sequence
  Synthetic Target Sequence/siNA sense region
uuugaugucuuucacuaua

SEQ ID NO: 526 - RNA, 19 nt, Artificial Sequence
  Synthetic Target Sequence/siNA sense region
acucugucugguaccagcu

SEQ ID NO: 527 - RNA, 19 nt, Artificial Sequence
  Synthetic Target Sequence/siNA sense region
uuacagcuuucugccggga

SEQ ID NO: 528 - RNA, 19 nt, Artificial Sequence
  Synthetic Target Sequence/siNA sense region
agucuacucagucuuuuac

SEQ ID NO: 529 - RNA, 19 nt, Artificial Sequence
  Synthetic Target Sequence/siNA sense region
cuuguacuugacauucuau

SEQ ID NO: 530 - RNA, 19 nt, Artificial Sequence
  Synthetic Target Sequence/siNA sense region
uuucaccaaugauguuuca

SEQ ID NO: 531 - RNA, 19 nt, Artificial Sequence
  Synthetic Target Sequence/siNA sense region
auucuuggcucaccuucaa

SEQ ID NO: 532 - RNA, 19 nt, Artificial Sequence
  Synthetic Target Sequence/siNA sense region
augguuugccauguuuucu

SEQ ID NO: 533 - RNA, 19 nt, Artificial Sequence
  Synthetic Target Sequence/siNA sense region
uccuauugugccuuuuugg

SEQ ID NO: 534 - RNA, 19 nt, Artificial Sequence
  Synthetic Target Sequence/siNA sense region
gauaacagcaaucuaugua

SEQ ID NO: 535 - RNA, 19 nt, Artificial Sequence
  Synthetic Target Sequence/siNA sense region
auucuguauuucucugaag

SEQ ID NO: 536 - RNA, 19 nt, Artificial Sequence
  Synthetic Target Sequence/siNA sense region
gcacugccauugguucuuu

SEQ ID NO: 537 - RNA, 19 nt, Artificial Sequence
  Synthetic Target Sequence/siNA sense region
uaacaacuaucuuaggaaa

SEQ ID NO: 538 - RNA, 19 nt, Artificial Sequence
  Synthetic Target Sequence/siNA sense region
aagagucauguuuaaugga

SEQ ID NO: 539 - RNA, 19 nt, Artificial Sequence
  Synthetic Target Sequence/siNA sense region
aguuacauuuaguaccuuc

SEQ ID NO: 540 - RNA, 19 nt, Artificial Sequence
  Synthetic Target Sequence/siNA sense region
cgaggaggcugcuuugugu

SEQ ID NO: 541 - RNA, 19 nt, Artificial Sequence
  Synthetic Target Sequence/siNA sense region
uaccuuuuugcucaacaag

SEQ ID NO: 542 - RNA, 19 nt, Artificial Sequence
  Synthetic Target Sequence/siNA sense region
ggaaauguaccuaaaauug

SEQ ID NO: 543 - RNA, 19 nt, Artificial Sequence
  Synthetic Target Sequence/siNA sense region
gcguagcgagacacuguug

SEQ ID NO: 544 - RNA, 19 nt, Artificial Sequence
  Synthetic Target Sequence/siNA sense region
gccacuuacacaguauaac

SEQ ID NO: 545 - RNA, 19 nt, Artificial Sequence
  Synthetic Target Sequence/siNA sense region
cagguaucuugcucuauau

SEQ ID NO: 546 - RNA, 19 nt, Artificial Sequence
  Synthetic Target Sequence/siNA sense region
uaacaaguacaaguauuuc

SEQ ID NO: 547 - RNA, 19 nt, Artificial Sequence
  Synthetic Target Sequence/siNA sense region
caguggagccuuagauacu

SEQ ID NO: 548 - RNA, 19 nt, Artificial Sequence
  Synthetic Target Sequence/siNA sense region
uaccagcuaucgugaagca

SEQ ID NO: 549 - RNA, 19 nt, Artificial Sequence
  Synthetic Target Sequence/siNA sense region
agcuugcugccacuuagca

SEQ ID NO: 550 - RNA, 19 nt, Artificial Sequence
  Synthetic Target Sequence/siNA sense region
aaaggcucuaaaugacuuu

SEQ ID NO: 551 - RNA, 19 nt, Artificial Sequence
  Synthetic Target Sequence/siNA sense region
uagcaacucaggugcugau

SEQ ID NO: 552 - RNA, 19 nt, Artificial Sequence
  Synthetic Target Sequence/siNA sense region
uguucucuaccaaccacca

SEQ ID NO: 553 - RNA, 19 nt, Artificial Sequence
  Synthetic Target Sequence/siNA sense region
acagacaucaaucacuucu

SEQ ID NO: 554 - RNA, 19 nt, Artificial Sequence
  Synthetic Target Sequence/siNA sense region
ugcuguucugcagaguggu

SEQ ID NO: 555 - RNA, 19 nt, Artificial Sequence
  Synthetic Target Sequence/siNA sense region
uuuuaggaaaauggcauuc

SEQ ID NO: 556 - RNA, 19 nt, Artificial Sequence
  Synthetic Target Sequence/siNA sense region
cccgucaggcaaaguugaa

SEQ ID NO: 557 - RNA, 19 nt, Artificial Sequence
  Synthetic Target Sequence/siNA sense region
agggugcaugguacaagua

SEQ ID NO: 558 - RNA, 19 nt, Artificial Sequence
  Synthetic Target Sequence/siNA sense region
aaccuguggaacuacaacu

SEQ ID NO: 559 - RNA, 19 nt, Artificial Sequence
  Synthetic Target Sequence/siNA sense region
ucuuaauggauugugguug

SEQ ID NO: 560 - RNA, 19 nt, Artificial Sequence
  Synthetic Target Sequence/siNA sense region
ggaugacacaguauacugu

SEQ ID NO: 561 - RNA, 19 nt, Artificial Sequence
  Synthetic Target Sequence/siNA sense region
uccaagacaugucauuugc

SEQ ID NO: 562 - RNA, 19 nt, Artificial Sequence
  Synthetic Target Sequence/siNA sense region
cacagcagaagacaugcuu

SEQ ID NO: 563 - RNA, 19 nt, Artificial Sequence
  Synthetic Target Sequence/siNA sense region
uaauccuaacuaugaagau

SEQ ID NO: 564 - RNA, 19 nt, Artificial Sequence
  Synthetic Target Sequence/siNA sense region
ucugcucauucgcaaaucc

SEQ ID NO: 565 - RNA, 19 nt, Artificial Sequence
  Synthetic Target Sequence/siNA sense region
caaccauagcuuucuuguu

SEQ ID NO: 566 - RNA, 19 nt, Artificial Sequence
  Synthetic Target Sequence/siNA sense region
ucaggcuggcaauguucaa

SEQ ID NO: 567 - RNA, 19 nt, Artificial Sequence
  Synthetic Target Sequence/siNA sense region
acuucguguuauuggccau

SEQ ID NO: 568 - RNA, 19 nt, Artificial Sequence
  Synthetic Target Sequence/siNA sense region
uucuaugcaaaauugucug

SEQ ID NO: 569 - RNA, 19 nt, Artificial Sequence
  Synthetic Target Sequence/siNA sense region
gcuuaggcuuaaaguugau

SEQ ID NO: 570 - RNA, 19 nt, Artificial Sequence
  Synthetic Target Sequence/siNA sense region
uacuucuaacccuaagaca

SEQ ID NO: 571 - RNA, 19 nt, Artificial Sequence
  Synthetic Target Sequence/siNA sense region
acccaaguauaaauuuguc

SEQ ID NO: 572 - RNA, 19 nt, Artificial Sequence
  Synthetic Target Sequence/siNA sense region
ccguauccaaccuggucaa

SEQ ID NO: 573 - RNA, 19 nt, Artificial Sequence
  Synthetic Target Sequence/siNA sense region
aacauuuucaguucuagca

SEQ ID NO: 574 - RNA, 19 nt, Artificial Sequence
  Synthetic Target Sequence/siNA sense region
augcuacaaugguucacca

SEQ ID NO: 575 - RNA, 19 nt, Artificial Sequence
  Synthetic Target Sequence/siNA sense region
aucugguguuuaucagugu

SEQ ID NO: 576 - RNA, 19 nt, Artificial Sequence
  Synthetic Target Sequence/siNA sense region
ugccaugagaccuaaucau

SEQ ID NO: 577 - RNA, 19 nt, Artificial Sequence
  Synthetic Target Sequence/siNA sense region
uaccauuaaagguucuuuc

SEQ ID NO: 578 - RNA, 19 nt, Artificial Sequence
  Synthetic Target Sequence/siNA sense region
ccuuaauggaucauguggu

SEQ ID NO: 579 - RNA, 19 nt, Artificial Sequence
  Synthetic Target Sequence/siNA sense region
uaguguugguuuuaacauu

SEQ ID NO: 580 - RNA, 19 nt, Artificial Sequence
  Synthetic Target Sequence/siNA sense region
ugauuaugauugcgugucu

SEQ ID NO: 581 - RNA, 19 nt, Artificial Sequence
  Synthetic Target Sequence/siNA sense region
uuucugcuauaugcaucau

SEQ ID NO: 582 - RNA, 19 nt, Artificial Sequence
  Synthetic Target Sequence/siNA sense region
uauggagcuuccaacagga

SEQ ID NO: 583 - RNA, 19 nt, Artificial Sequence
  Synthetic Target Sequence/siNA sense region
aguacacgcugguacugac

SEQ ID NO: 584 - RNA, 19 nt, Artificial Sequence
  Synthetic Target Sequence/siNA sense region
cuuagaagguaaauucuau

SEQ ID NO: 585 - RNA, 19 nt, Artificial Sequence
  Synthetic Target Sequence/siNA sense region
ugguccauuuguugacaga

SEQ ID NO: 586 - RNA, 19 nt, Artificial Sequence
  Synthetic Target Sequence/siNA sense region
acaaacugcacaggcugca

SEQ ID NO: 587 - RNA, 19 nt, Artificial Sequence
  Synthetic Target Sequence/siNA sense region
agguacagacacaaccaua

SEQ ID NO: 588 - RNA, 19 nt, Artificial Sequence
  Synthetic Target Sequence/siNA sense region
aacauuaaauguuuuggca

SEQ ID NO: 589 - RNA, 19 nt, Artificial Sequence
  Synthetic Target Sequence/siNA sense region
auggcuguaugcugcuguu

SEQ ID NO: 590 - RNA, 19 nt, Artificial Sequence
  Synthetic Target Sequence/siNA sense region
uaucaauggugauaggugg

SEQ ID NO: 591 - RNA, 19 nt, Artificial Sequence
  Synthetic Target Sequence/siNA sense region
guuucuuaauagauucacc

SEQ ID NO: 592 - RNA, 19 nt, Artificial Sequence
  Synthetic Target Sequence/siNA sense region
cacuacuuugaaugacuuu

SEQ ID NO: 593 - RNA, 19 nt, Artificial Sequence
  Synthetic Target Sequence/siNA sense region
uaaccuuguggcaaugaag

SEQ ID NO: 594 - RNA, 19 nt, Artificial Sequence
  Synthetic Target Sequence/siNA sense region
guacaacuaugaaccuuug

SEQ ID NO: 595 - RNA, 19 nt, Artificial Sequence
  Synthetic Target Sequence/siNA sense region
gacacaagaucauguugac

SEQ ID NO: 596 - RNA, 19 nt, Artificial Sequence
  Synthetic Target Sequence/siNA sense region
cauauugggaccucuuucu

SEQ ID NO: 597 - RNA, 19 nt, Artificial Sequence
  Synthetic Target Sequence/siNA sense region
ugcucaaacaggaauugcc

SEQ ID NO: 598 - RNA, 19 nt, Artificial Sequence
  Synthetic Target Sequence/siNA sense region
cgucuuagauaugugugcu

SEQ ID NO: 599 - RNA, 19 nt, Artificial Sequence
  Synthetic Target Sequence/siNA sense region
ugcuuugaaagagcugcug

SEQ ID NO: 600 - RNA, 19 nt, Artificial Sequence
  Synthetic Target Sequence/siNA sense region
gcagaaugguaugaauggu

SEQ ID NO: 601 - RNA, 19 nt, Artificial Sequence
  Synthetic Target Sequence/siNA sense region
ucguacuauccuugguagc

SEQ ID NO: 602 - RNA, 19 nt, Artificial Sequence
  Synthetic Target Sequence/siNA sense region
cacuauuuuagaagaugag

SEQ ID NO: 603 - RNA, 19 nt, Artificial Sequence
  Synthetic Target Sequence/siNA sense region
guuuacaccauuugauguu

SEQ ID NO: 604 - RNA, 19 nt, Artificial Sequence
  Synthetic Target Sequence/siNA sense region
uguuagacaaugcucuggu

SEQ ID NO: 605 - RNA, 19 nt, Artificial Sequence
  Synthetic Target Sequence/siNA sense region
uguuaccuuccaagguaag

SEQ ID NO: 606 - RNA, 19 nt, Artificial Sequence
  Synthetic Target Sequence/siNA sense region
guucaagaaaauuguuaag

SEQ ID NO: 607 - RNA, 19 nt, Artificial Sequence
  Synthetic Target Sequence/siNA sense region
gggcacucaucauuggaug

SEQ ID NO: 608 - RNA, 19 nt, Artificial Sequence
  Synthetic Target Sequence/siNA sense region
gcuuuuaacuuucuugaca

SEQ ID NO: 609 - RNA, 19 nt, Artificial Sequence
  Synthetic Target Sequence/siNA sense region
aucacuauugauucuuguu

SEQ ID NO: 610 - RNA, 19 nt, Artificial Sequence
  Synthetic Target Sequence/siNA sense region
ucaaaguacacagugguca

SEQ ID NO: 611 - RNA, 19 nt, Artificial Sequence
  Synthetic Target Sequence/siNA sense region
acuguuuuucuuuguuuac

SEQ ID NO: 612 - RNA, 19 nt, Artificial Sequence
  Synthetic Target Sequence/siNA sense region
cgagaaugcuuucuugcca

SEQ ID NO: 613 - RNA, 19 nt, Artificial Sequence
  Synthetic Target Sequence/siNA sense region
auuuacucuugguauuaug

SEQ ID NO: 614 - RNA, 19 nt, Artificial Sequence
  Synthetic Target Sequence/siNA sense region
ggcaauugcugcaugugcu

SEQ ID NO: 615 - RNA, 19 nt, Artificial Sequence
  Synthetic Target Sequence/siNA sense region
uaugcugcuuguuaagcau

SEQ ID NO: 616 - RNA, 19 nt, Artificial Sequence
  Synthetic Target Sequence/siNA sense region
uaagcacgcauucuugugc

SEQ ID NO: 617 - RNA, 19 nt, Artificial Sequence
  Synthetic Target Sequence/siNA sense region
cuuguuucuguuaccuucu

SEQ ID NO: 618 - RNA, 19 nt, Artificial Sequence
  Synthetic Target Sequence/siNA sense region
ucuugcaacaguugcuuac

SEQ ID NO: 619 - RNA, 19 nt, Artificial Sequence
  Synthetic Target Sequence/siNA sense region
cuuuaauauggucuacaug

SEQ ID NO: 620 - RNA, 19 nt, Artificial Sequence
  Synthetic Target Sequence/siNA sense region
gccugcuagcugggugaug

SEQ ID NO: 621 - RNA, 19 nt, Artificial Sequence
  Synthetic Target Sequence/siNA sense region
gcguaucaugacauggcuu

SEQ ID NO: 622 - RNA, 19 nt, Artificial Sequence
  Synthetic Target Sequence/siNA sense region
ugaauuggcugacacuagc

SEQ ID NO: 623 - RNA, 19 nt, Artificial Sequence
  Synthetic Target Sequence/siNA sense region
cuugucugguuauaggcuu

SEQ ID NO: 624 - RNA, 19 nt, Artificial Sequence
  Synthetic Target Sequence/siNA sense region
uaaggauuguguuauguau

SEQ ID NO: 625 - RNA, 19 nt, Artificial Sequence
  Synthetic Target Sequence/siNA sense region
ugcuucagcuuuaguuuug

SEQ ID NO: 626 - RNA, 19 nt, Artificial Sequence
  Synthetic Target Sequence/siNA sense region
gcuuauucucaugacagcu

SEQ ID NO: 627 - RNA, 19 nt, Artificial Sequence
  Synthetic Target Sequence/siNA sense region
ucgcacuguuuaugaugau

SEQ ID NO: 628 - RNA, 19 nt, Artificial Sequence
  Synthetic Target Sequence/siNA sense region
ugcugcuagacguguuugg

SEQ ID NO: 629 - RNA, 19 nt, Artificial Sequence
  Synthetic Target Sequence/siNA sense region
gacacugaugaaugucauu

SEQ ID NO: 630 - RNA, 19 nt, Artificial Sequence
  Synthetic Target Sequence/siNA sense region
uacacuuguuuacaaaguc

SEQ ID NO: 631 - RNA, 19 nt, Artificial Sequence
  Synthetic Target Sequence/siNA sense region
cuacuaugguaaugcuuua

SEQ ID NO: 632 - RNA, 19 nt, Artificial Sequence
  Synthetic Target Sequence/siNA sense region
agaucaagcuauuuccaug

SEQ ID NO: 633 - RNA, 19 nt, Artificial Sequence
  Synthetic Target Sequence/siNA sense region
gugggccuuaguuauuucu

SEQ ID NO: 634 - RNA, 19 nt, Artificial Sequence
  Synthetic Target Sequence/siNA sense region
uguaaccucuaacuauucu

SEQ ID NO: 635 - RNA, 19 nt, Artificial Sequence
  Synthetic Target Sequence/siNA sense region
uggugucguuacgacuauc

SEQ ID NO: 636 - RNA, 19 nt, Artificial Sequence
  Synthetic Target Sequence/siNA sense region
cauguuuuuagcuagagcu

SEQ ID NO: 637 - RNA, 19 nt, Artificial Sequence
  Synthetic Target Sequence/siNA sense region
uauaguguuuguguguguu

SEQ ID NO: 638 - RNA, 19 nt, Artificial Sequence
  Synthetic Target Sequence/siNA sense region
ugaguauuacccauuguua

SEQ ID NO: 639 - RNA, 19 nt, Artificial Sequence
  Synthetic Target Sequence/siNA sense region
auuuauuacuggcaacacc

SEQ ID NO: 640 - RNA, 19 nt, Artificial Sequence
  Synthetic Target Sequence/siNA sense region
cuuacaguguaucaugcuu

SEQ ID NO: 641 - RNA, 19 nt, Artificial Sequence
  Synthetic Target Sequence/siNA sense region
uguuuauuguuucuuaggc

SEQ ID NO: 642 - RNA, 19 nt, Artificial Sequence
  Synthetic Target Sequence/siNA sense region
cuauuguugcugcugcuac

SEQ ID NO: 643 - RNA, 19 nt, Artificial Sequence
  Synthetic Target Sequence/siNA sense region
cuuuggccuuuucuguuua

SEQ ID NO: 644 - RNA, 19 nt, Artificial Sequence
  Synthetic Target Sequence/siNA sense region
acucaaccguuacuucagg

SEQ ID NO: 645 - RNA, 19 nt, Artificial Sequence
  Synthetic Target Sequence/siNA sense region
gcuuacucuugguguuuau

SEQ ID NO: 646 - RNA, 19 nt, Artificial Sequence
  Synthetic Target Sequence/siNA sense region
ugacuacuuggucucuaca

SEQ ID NO: 647 - RNA, 19 nt, Artificial Sequence
  Synthetic Target Sequence/siNA sense region
acaagaauuuagguauaug

SEQ ID NO: 648 - RNA, 19 nt, Artificial Sequence
  Synthetic Target Sequence/siNA sense region
gaacucccaggggcuuuug

SEQ ID NO: 649 - RNA, 19 nt, Artificial Sequence
  Synthetic Target Sequence/siNA sense region
gccuccuaagaguaguauu

SEQ ID NO: 650 - RNA, 19 nt, Artificial Sequence
  Synthetic Target Sequence/siNA sense region
ugaugcuuucaagcuuaac

SEQ ID NO: 651 - RNA, 19 nt, Artificial Sequence
  Synthetic Target Sequence/siNA sense region
cauuaaguuguuggguauu

SEQ ID NO: 652 - RNA, 19 nt, Artificial Sequence
  Synthetic Target Sequence/siNA sense region
uggagguaaaccauguauc

SEQ ID NO: 653 - RNA, 19 nt, Artificial Sequence
  Synthetic Target Sequence/siNA sense region
caagguugcuacuguacag

SEQ ID NO: 654 - RNA, 19 nt, Artificial Sequence
  Synthetic Target Sequence/siNA sense region
gucuaaaaugucugacgua

SEQ ID NO: 655 - RNA, 19 nt, Artificial Sequence
  Synthetic Target Sequence/siNA sense region
aaagugcacaucuguggua

SEQ ID NO: 656 - RNA, 19 nt, Artificial Sequence
  Synthetic Target Sequence/siNA sense region
acugcucucgguucuucaa

SEQ ID NO: 657 - RNA, 19 nt, Artificial Sequence
  Synthetic Target Sequence/siNA sense region
acaacuuagaguagaguca

SEQ ID NO: 658 - RNA, 19 nt, Artificial Sequence
  Synthetic Target Sequence/siNA sense region
aucuucuaaauugugggca

SEQ ID NO: 659 - RNA, 19 nt, Artificial Sequence
  Synthetic Target Sequence/siNA sense region
acaauguguacaacuccac

SEQ ID NO: 660 - RNA, 19 nt, Artificial Sequence
  Synthetic Target Sequence/siNA sense region
caaugauauucuucuugca

SEQ ID NO: 661 - RNA, 19 nt, Artificial Sequence
  Synthetic Target Sequence/siNA sense region
aaaagacacaacugaagcu

SEQ ID NO: 662 - RNA, 19 nt, Artificial Sequence
  Synthetic Target Sequence/siNA sense region
uuucgagaagaugguuucu

SEQ ID NO: 663 - RNA, 19 nt, Artificial Sequence
  Synthetic Target Sequence/siNA sense region
ucuuuugucuguuuugcua

SEQ ID NO: 664 - RNA, 19 nt, Artificial Sequence
  Synthetic Target Sequence/siNA sense region
auccaugcagggugcugua

SEQ ID NO: 665 - RNA, 19 nt, Artificial Sequence
  Synthetic Target Sequence/siNA sense region
agacauuaauagguugugc

SEQ ID NO: 666 - RNA, 19 nt, Artificial Sequence
  Synthetic Target Sequence/siNA sense region
cgaggaaaugcucgauaac

SEQ ID NO: 667 - RNA, 19 nt, Artificial Sequence
  Synthetic Target Sequence/siNA sense region
ccgugcuacucuucaggcu

SEQ ID NO: 668 - RNA, 19 nt, Artificial Sequence
  Synthetic Target Sequence/siNA sense region
uauugcuucagaauuuagu

SEQ ID NO: 669 - RNA, 19 nt, Artificial Sequence
  Synthetic Target Sequence/siNA sense region
uucuuuaccaucauaugcc

SEQ ID NO: 670 - RNA, 19 nt, Artificial Sequence
  Synthetic Target Sequence/siNA sense region
cgcuuaugccacugcccag

SEQ ID NO: 671 - RNA, 19 nt, Artificial Sequence
  Synthetic Target Sequence/siNA sense region
ggaggccuaugagcaggcu

SEQ ID NO: 672 - RNA, 19 nt, Artificial Sequence
  Synthetic Target Sequence/siNA sense region
uguagcuaauggugauucu

SEQ ID NO: 673 - RNA, 19 nt, Artificial Sequence
  Synthetic Target Sequence/siNA sense region
ugaagucguucucaaaaag

SEQ ID NO: 674 - RNA, 19 nt, Artificial Sequence
  Synthetic Target Sequence/siNA sense region
guuaaagaaaucuuugaau

SEQ ID NO: 675 - RNA, 19 nt, Artificial Sequence
  Synthetic Target Sequence/siNA sense region
uguggcuaaaucugaguuu

SEQ ID NO: 676 - RNA, 19 nt, Artificial Sequence
  Synthetic Target Sequence/siNA sense region
ugaccgugaugcugccaug

SEQ ID NO: 677 - RNA, 19 nt, Artificial Sequence
  Synthetic Target Sequence/siNA sense region
gcaacgcaaguuggaaaag

SEQ ID NO: 678 - RNA, 19 nt, Artificial Sequence
  Synthetic Target Sequence/siNA sense region
gauggcagaucaggcuaug

SEQ ID NO: 679 - RNA, 19 nt, Artificial Sequence
  Synthetic Target Sequence/siNA sense region
gacccaaauguacaaacag

SEQ ID NO: 680 - RNA, 19 nt, Artificial Sequence
  Synthetic Target Sequence/siNA sense region
ggcaagaucugaggacaag

SEQ ID NO: 681 - RNA, 19 nt, Artificial Sequence
  Synthetic Target Sequence/siNA sense region
gagggcaaaaguaacuagu

SEQ ID NO: 682 - RNA, 19 nt, Artificial Sequence
  Synthetic Target Sequence/siNA sense region
ugcuaugcaaacaaugcuc

SEQ ID NO: 683 - RNA, 19 nt, Artificial Sequence
  Synthetic Target Sequence/siNA sense region
cuucacuaugcuuaggaag

SEQ ID NO: 684 - RNA, 19 nt, Artificial Sequence
  Synthetic Target Sequence/siNA sense region
gcuugauaaugaugcacuu

SEQ ID NO: 685 - RNA, 19 nt, Artificial Sequence
  Synthetic Target Sequence/siNA sense region
uaacaacauuaucaacaau

SEQ ID NO: 686 - RNA, 19 nt, Artificial Sequence
  Synthetic Target Sequence/siNA sense region
ugcgcgugaugguuguguu

SEQ ID NO: 687 - RNA, 19 nt, Artificial Sequence
  Synthetic Target Sequence/siNA sense region
uccacucaacaucauacca

SEQ ID NO: 688 - RNA, 19 nt, Artificial Sequence
  Synthetic Target Sequence/siNA sense region
auugacuacagcagccaaa

SEQ ID NO: 689 - RNA, 19 nt, Artificial Sequence
  Synthetic Target Sequence/siNA sense region
acucaugguuguugucccu

SEQ ID NO: 690 - RNA, 19 nt, Artificial Sequence
  Synthetic Target Sequence/siNA sense region
ugauuaugguaccuacaag

SEQ ID NO: 691 - RNA, 19 nt, Artificial Sequence
  Synthetic Target Sequence/siNA sense region
gaacacuugugaugguaac

SEQ ID NO: 692 - RNA, 19 nt, Artificial Sequence
  Synthetic Target Sequence/siNA sense region
caccuuuacauaugcaucu

SEQ ID NO: 693 - RNA, 19 nt, Artificial Sequence
  Synthetic Target Sequence/siNA sense region
ugcacucugggaaauccag

SEQ ID NO: 694 - RNA, 19 nt, Artificial Sequence
  Synthetic Target Sequence/siNA sense region
gcaaguuguugaugcggau

SEQ ID NO: 695 - RNA, 19 nt, Artificial Sequence
  Synthetic Target Sequence/siNA sense region
uagcaagauuguucaacuu

SEQ ID NO: 696 - RNA, 19 nt, Artificial Sequence
  Synthetic Target Sequence/siNA sense region
uagugaaauuaacauggac

SEQ ID NO: 697 - RNA, 19 nt, Artificial Sequence
  Synthetic Target Sequence/siNA sense region
caauucaccaaauuuggcu

SEQ ID NO: 698 - RNA, 19 nt, Artificial Sequence
  Synthetic Target Sequence/siNA sense region
uuggccucuuauuguuaca

SEQ ID NO: 699 - RNA, 19 nt, Artificial Sequence
  Synthetic Target Sequence/siNA sense region
agcucuaagagccaacuca

SEQ ID NO: 700 - RNA, 19 nt, Artificial Sequence
  Synthetic Target Sequence/siNA sense region
agcuguuaaacuacagaau

SEQ ID NO: 701 - RNA, 19 nt, Artificial Sequence
  Synthetic Target Sequence/siNA sense region
uaaugaacugaguccagua

SEQ ID NO: 702 - RNA, 19 nt, Artificial Sequence
  Synthetic Target Sequence/siNA sense region
agcacuacgacagaugucc

SEQ ID NO: 703 - RNA, 19 nt, Artificial Sequence
  Synthetic Target Sequence/siNA sense region
cugugcggcugguaccaca

SEQ ID NO: 704 - RNA, 19 nt, Artificial Sequence
  Synthetic Target Sequence/siNA sense region
acaaacagcuuguacugau

SEQ ID NO: 705 - RNA, 19 nt, Artificial Sequence
  Synthetic Target Sequence/siNA sense region
ugacaaugcacuugccuac

SEQ ID NO: 706 - RNA, 19 nt, Artificial Sequence
  Synthetic Target Sequence/siNA sense region
cuauaacaauucgaaggga

SEQ ID NO: 707 - RNA, 19 nt, Artificial Sequence
  Synthetic Target Sequence/siNA sense region
agguagguuugugcuggca

SEQ ID NO: 708 - RNA, 19 nt, Artificial Sequence
  Synthetic Target Sequence/siNA sense region
auuacuaucagaccaccaa

SEQ ID NO: 709 - RNA, 19 nt, Artificial Sequence
  Synthetic Target Sequence/siNA sense region
agaucucaaaugggcuaga

SEQ ID NO: 710 - RNA, 19 nt, Artificial Sequence
  Synthetic Target Sequence/siNA sense region
auucccuaagagugauggu

SEQ ID NO: 711 - RNA, 19 nt, Artificial Sequence
  Synthetic Target Sequence/siNA sense region
uacagguacaauuuacaca

SEQ ID NO: 712 - RNA, 19 nt, Artificial Sequence
  Synthetic Target Sequence/siNA sense region
agaacuggaaccaccuugu

SEQ ID NO: 713 - RNA, 19 nt, Artificial Sequence
  Synthetic Target Sequence/siNA sense region
uagguuuguuacagacaca

SEQ ID NO: 714 - RNA, 19 nt, Artificial Sequence
  Synthetic Target Sequence/siNA sense region
accaaaagggccuaaagug

SEQ ID NO: 715 - RNA, 19 nt, Artificial Sequence
  Synthetic Target Sequence/siNA sense region
gaaauacuuguacuucauc

SEQ ID NO: 716 - RNA, 19 nt, Artificial Sequence
  Synthetic Target Sequence/siNA sense region
caaaggcuuaaacaaccua

SEQ ID NO: 717 - RNA, 19 nt, Artificial Sequence
  Synthetic Target Sequence/siNA sense region
aaauagagguauggugcug

SEQ ID NO: 718 - RNA, 19 nt, Artificial Sequence
  Synthetic Target Sequence/siNA sense region
gggcaguuuagcugcuaca

SEQ ID NO: 719 - RNA, 19 nt, Artificial Sequence
  Synthetic Target Sequence/siNA sense region
aguacgucuucaggcugga

SEQ ID NO: 720 - RNA, 19 nt, Artificial Sequence
  Synthetic Target Sequence/siNA sense region
aaaugcuacagaaguaccu

SEQ ID NO: 721 - RNA, 19 nt, Artificial Sequence
  Synthetic Target Sequence/siNA sense region
ugccaauucaacugugcuu

SEQ ID NO: 722 - RNA, 19 nt, Artificial Sequence
  Synthetic Target Sequence/siNA sense region
uuccuucugugcuuuugca

SEQ ID NO: 723 - RNA, 19 nt, Artificial Sequence
  Synthetic Target Sequence/siNA sense region
aguagacccugcuaaagca

SEQ ID NO: 724 - RNA, 19 nt, Artificial Sequence
  Synthetic Target Sequence/siNA sense region
auauaaggauuaccuagca

SEQ ID NO: 725 - RNA, 19 nt, Artificial Sequence
  Synthetic Target Sequence/siNA sense region
aaguggaggacaaccaauc

SEQ ID NO: 726 - RNA, 19 nt, Artificial Sequence
  Synthetic Target Sequence/siNA sense region
caccaacugugugaagaug

SEQ ID NO: 727 - RNA, 19 nt, Artificial Sequence
  Synthetic Target Sequence/siNA sense region
guuguguacacacacuggu

SEQ ID NO: 728 - RNA, 19 nt, Artificial Sequence
  Synthetic Target Sequence/siNA sense region
uacaggacaggcaauuacu

SEQ ID NO: 729 - RNA, 19 nt, Artificial Sequence
  Synthetic Target Sequence/siNA sense region
uguaacaccagaagcuaac

SEQ ID NO: 730 - RNA, 19 nt, Artificial Sequence
  Synthetic Target Sequence/siNA sense region
cauggaccaagaguccuuu

SEQ ID NO: 731 - RNA, 19 nt, Artificial Sequence
  Synthetic Target Sequence/siNA sense region
ugguggugcuucauguugu

SEQ ID NO: 732 - RNA, 19 nt, Artificial Sequence
  Synthetic Target Sequence/siNA sense region
ucuguauuguagaugccac

SEQ ID NO: 733 - RNA, 19 nt, Artificial Sequence
  Synthetic Target Sequence/siNA sense region
cauugaccauccaaauccu

SEQ ID NO: 734 - RNA, 19 nt, Artificial Sequence
  Synthetic Target Sequence/siNA sense region
uaaaggauucugugacuug

SEQ ID NO: 735 - RNA, 19 nt, Artificial Sequence
  Synthetic Target Sequence/siNA sense region
gaaagguaaguacguccaa

SEQ ID NO: 736 - RNA, 19 nt, Artificial Sequence
  Synthetic Target Sequence/siNA sense region
aauaccuaccacuugugcu

SEQ ID NO: 737 - RNA, 19 nt, Artificial Sequence
  Synthetic Target Sequence/siNA sense region
uaaugacccaguggguuuu

SEQ ID NO: 738 - RNA, 19 nt, Artificial Sequence
  Synthetic Target Sequence/siNA sense region
uacacuuagaaacacaguc

SEQ ID NO: 739 - RNA, 19 nt, Artificial Sequence
  Synthetic Target Sequence/siNA sense region
cuguaccgucugcggaaug

SEQ ID NO: 740 - RNA, 19 nt, Artificial Sequence
  Synthetic Target Sequence/siNA sense region
guggaaagguuauggcugu

SEQ ID NO: 741 - RNA, 19 nt, Artificial Sequence
  Synthetic Target Sequence/siNA sense region
uaguugugaccaacuccgc

SEQ ID NO: 742 - RNA, 19 nt, Artificial Sequence
  Synthetic Target Sequence/siNA sense region
cgaacccuugaugcagucu

SEQ ID NO: 743 - RNA, 19 nt, Artificial Sequence
  Synthetic Target Sequence/siNA sense region
ugcggaugcaucaacguuu

SEQ ID NO: 744 - RNA, 19 nt, Artificial Sequence
  Synthetic Target Sequence/siNA sense region
uuuaaacggguuugcggug

SEQ ID NO: 745 - RNA, 19 nt, Artificial Sequence
  Synthetic Target Sequence/siNA sense region
guaagugcagcccgucuua

SEQ ID NO: 746 - RNA, 19 nt, Artificial Sequence
  Synthetic Target Sequence/siNA sense region
acaccgugcggcacaggca

SEQ ID NO: 747 - RNA, 19 nt, Artificial Sequence
  Synthetic Target Sequence/siNA sense region
acuaguacugaugucgucu

SEQ ID NO: 748 - RNA, 19 nt, Artificial Sequence
  Synthetic Target Sequence/siNA sense region
uacagggcuuuugauauuu

SEQ ID NO: 749 - RNA, 19 nt, Artificial Sequence
  Synthetic Target Sequence/siNA sense region
uacaacgaaaaaguugcug

SEQ ID NO: 750 - RNA, 19 nt, Artificial Sequence
  Synthetic Target Sequence/siNA sense region
gguuuugcaaaguuccuaa

SEQ ID NO: 751 - RNA, 19 nt, Artificial Sequence
  Synthetic Target Sequence/siNA sense region
aaaacuaauugcugucgcu

SEQ ID NO: 752 - RNA, 19 nt, Artificial Sequence
  Synthetic Target Sequence/siNA sense region
uuccaggagaaggaugagg

SEQ ID NO: 753 - RNA, 19 nt, Artificial Sequence
  Synthetic Target Sequence/siNA sense region
gaaggcaauuuauuagacu

SEQ ID NO: 754 - RNA, 19 nt, Artificial Sequence
  Synthetic Target Sequence/siNA sense region
ucuuacuuuguaguuaaga

SEQ ID NO: 755 - RNA, 19 nt, Artificial Sequence
  Synthetic Target Sequence/siNA sense region
aggcauacuaugucuaacu

SEQ ID NO: 756 - RNA, 19 nt, Artificial Sequence
  Synthetic Target Sequence/siNA sense region
uaccaacaugaagagacua

SEQ ID NO: 757 - RNA, 19 nt, Artificial Sequence
  Synthetic Target Sequence/siNA sense region
auuuauaacuugguuaaag

SEQ ID NO: 758 - RNA, 19 nt, Artificial Sequence
  Synthetic Target Sequence/siNA sense region
gauuguccagcgguugcug

SEQ ID NO: 759 - RNA, 19 nt, Artificial Sequence
  Synthetic Target Sequence/siNA sense region
guccaugacuuuuucaagu

SEQ ID NO: 760 - RNA, 19 nt, Artificial Sequence
  Synthetic Target Sequence/siNA sense region
uuuagaguagauggugaca

SEQ ID NO: 761 - RNA, 19 nt, Artificial Sequence
  Synthetic Target Sequence/siNA sense region
augguaccacauauaucac

SEQ ID NO: 762 - RNA, 19 nt, Artificial Sequence
  Synthetic Target Sequence/siNA sense region
cgucagcgucuaacuaaau

SEQ ID NO: 763 - RNA, 19 nt, Artificial Sequence
  Synthetic Target Sequence/siNA sense region
uacacaauggcugauuuag

SEQ ID NO: 764 - RNA, 19 nt, Artificial Sequence
  Synthetic Target Sequence/siNA sense region
gucuaugcucuacgucauu

SEQ ID NO: 765 - RNA, 19 nt, Artificial Sequence
  Synthetic Target Sequence/siNA sense region
uuugaugaggguaauugug

SEQ ID NO: 766 - RNA, 19 nt, Artificial Sequence
  Synthetic Target Sequence/siNA sense region
gauacauuaaaagaaauac

SEQ ID NO: 767 - RNA, 19 nt, Artificial Sequence
  Synthetic Target Sequence/siNA sense region
cucgucacauacaauugcu

SEQ ID NO: 768 - RNA, 19 nt, Artificial Sequence
  Synthetic Target Sequence/siNA sense region
ugugaugaugauuauuuca

SEQ ID NO: 769 - RNA, 19 nt, Artificial Sequence
  Synthetic Target Sequence/siNA sense region
aauaagaaggauugguaug

SEQ ID NO: 770 - RNA, 19 nt, Artificial Sequence
  Synthetic Target Sequence/siNA sense region
gacuucguagagaauccug

SEQ ID NO: 771 - RNA, 19 nt, Artificial Sequence
  Synthetic Target Sequence/siNA sense region
gacaucuuacgcguauaug

SEQ ID NO: 772 - RNA, 19 nt, Artificial Sequence
  Synthetic Target Sequence/siNA sense region
gcuaacuuaggugagcgug

SEQ ID NO: 773 - RNA, 19 nt, Artificial Sequence
  Synthetic Target Sequence/siNA sense region
guacgccaaucauuauuaa

SEQ ID NO: 774 - RNA, 19 nt, Artificial Sequence
  Synthetic Target Sequence/siNA sense region
aagacuguacaauucugcg

SEQ ID NO: 775 - RNA, 19 nt, Artificial Sequence
  Synthetic Target Sequence/siNA sense region
gaugcuaugcgugaugcag

SEQ ID NO: 776 - RNA, 19 nt, Artificial Sequence
  Synthetic Target Sequence/siNA sense region
ggcauuguaggcguacuga

SEQ ID NO: 777 - RNA, 19 nt, Artificial Sequence
  Synthetic Target Sequence/siNA sense region
acauuagauaaucaggauc

SEQ ID NO: 778 - RNA, 19 nt, Artificial Sequence
  Synthetic Target Sequence/siNA sense region
cuuaaugggaacugguacg

SEQ ID NO: 779 - RNA, 19 nt, Artificial Sequence
  Synthetic Target Sequence/siNA sense region
gauuucggugauuucguac

SEQ ID NO: 780 - RNA, 19 nt, Artificial Sequence
  Synthetic Target Sequence/siNA sense region
caaguagcaccaggcugcg

SEQ ID NO: 781 - RNA, 19 nt, Artificial Sequence
  Synthetic Target Sequence/siNA sense region
ggaguuccuauuguggauu

SEQ ID NO: 782 - RNA, 19 nt, Artificial Sequence
  Synthetic Target Sequence/siNA sense region
ucauauuacucauugcuga

SEQ ID NO: 783 - RNA, 19 nt, Artificial Sequence
  Synthetic Target Sequence/siNA sense region
augcccauccucacuuuga

SEQ ID NO: 784 - RNA, 19 nt, Artificial Sequence
  Synthetic Target Sequence/siNA sense region
acuagggcauuggcugcug

SEQ ID NO: 785 - RNA, 19 nt, Artificial Sequence
  Synthetic Target Sequence/siNA sense region
gagucccauauggaugcug

SEQ ID NO: 786 - RNA, 19 nt, Artificial Sequence
  Synthetic Target Sequence/siNA sense region
gaucucgcaaaaccacuua

SEQ ID NO: 787 - RNA, 19 nt, Artificial Sequence
  Synthetic Target Sequence/siNA sense region
auuaagugggauuugcuga

SEQ ID NO: 788 - RNA, 19 nt, Artificial Sequence
  Synthetic Target Sequence/siNA sense region
aaauaugauuuuacggaag

SEQ ID NO: 789 - RNA, 19 nt, Artificial Sequence
  Synthetic Target Sequence/siNA sense region
gagagacuuugucucuucg

SEQ ID NO: 790 - RNA, 19 nt, Artificial Sequence
  Synthetic Target Sequence/siNA sense region
gaccguuauuuuaaauauu

SEQ ID NO: 791 - RNA, 19 nt, Artificial Sequence
  Synthetic Target Sequence/siNA sense region
ugggaccagacauaccauc

SEQ ID NO: 792 - RNA, 19 nt, Artificial Sequence
  Synthetic Target Sequence/siNA sense region
cccaauuguauuaacuguu

SEQ ID NO: 793 - RNA, 19 nt, Artificial Sequence
  Synthetic Target Sequence/siNA sense region
uuggaugauagguguaucc

SEQ ID NO: 794 - RNA, 19 nt, Artificial Sequence
  Synthetic Target Sequence/siNA sense region
cuucauugugcaaacuuua

SEQ ID NO: 795 - RNA, 19 nt, Artificial Sequence
  Synthetic Target Sequence/siNA sense region
aauguguuauuuucuacug

SEQ ID NO: 796 - RNA, 19 nt, Artificial Sequence
  Synthetic Target Sequence/siNA sense region
guguuuccaccuacaaguu

SEQ ID NO: 797 - RNA, 19 nt, Artificial Sequence
  Synthetic Target Sequence/siNA sense region
uuuggaccacuaguaagaa

SEQ ID NO: 798 - RNA, 19 nt, Artificial Sequence
  Synthetic Target Sequence/siNA sense region
aaaauauuuguagauggug

SEQ ID NO: 799 - RNA, 19 nt, Artificial Sequence
  Synthetic Target Sequence/siNA sense region
guuccuuuuguuguuucaa

SEQ ID NO: 800 - RNA, 19 nt, Artificial Sequence
  Synthetic Target Sequence/siNA sense region
acuggauaccauuuucgug

SEQ ID NO: 801 - RNA, 19 nt, Artificial Sequence
  Synthetic Target Sequence/siNA sense region
gaguuaggagucguacaua

SEQ ID NO: 802 - RNA, 19 nt, Artificial Sequence
  Synthetic Target Sequence/siNA sense region
aaucaggauguaaacuuac

SEQ ID NO: 803 - RNA, 19 nt, Artificial Sequence
  Synthetic Target Sequence/siNA sense region
cauagcucgcgucucaguu

SEQ ID NO: 804 - RNA, 19 nt, Artificial Sequence
  Synthetic Target Sequence/siNA sense region
uucaaggaacuuuuagugu

SEQ ID NO: 805 - RNA, 19 nt, Artificial Sequence
  Synthetic Target Sequence/siNA sense region
uaugcugcugauccagcua

SEQ ID NO: 806 - RNA, 19 nt, Artificial Sequence
  Synthetic Target Sequence/siNA sense region
augcaugcagcuucuggca

SEQ ID NO: 807 - RNA, 19 nt, Artificial Sequence
  Synthetic Target Sequence/siNA sense region
aauuuauugcuagauaaac

SEQ ID NO: 808 - RNA, 19 nt, Artificial Sequence
  Synthetic Target Sequence/siNA sense region
cgcacuacaugcuuuucag

SEQ ID NO: 809 - RNA, 19 nt, Artificial Sequence
  Synthetic Target Sequence/siNA sense region
guagcugcacuaacaaaca

SEQ ID NO: 810 - RNA, 19 nt, Artificial Sequence
  Synthetic Target Sequence/siNA sense region
aauguugcuuuucaaacug

SEQ ID NO: 811 - RNA, 19 nt, Artificial Sequence
  Synthetic Target Sequence/siNA sense region
gucaaacccgguaauuuua

SEQ ID NO: 812 - RNA, 19 nt, Artificial Sequence
  Synthetic Target Sequence/siNA sense region
aauaaagacuuuuaugacu

SEQ ID NO: 813 - RNA, 19 nt, Artificial Sequence
  Synthetic Target Sequence/siNA sense region
uuugcugugucuaaagguu

SEQ ID NO: 814 - RNA, 19 nt, Artificial Sequence
  Synthetic Target Sequence/siNA sense region
uucuuuaaggaaggaaguu

SEQ ID NO: 815 - RNA, 19 nt, Artificial Sequence
  Synthetic Target Sequence/siNA sense region
ucuguugaacuaaaacacu

SEQ ID NO: 816 - RNA, 19 nt, Artificial Sequence
  Synthetic Target Sequence/siNA sense region
uucuucuuugcucaggaug

SEQ ID NO: 817 - RNA, 19 nt, Artificial Sequence
  Synthetic Target Sequence/siNA sense region
ggcaacgcugcuaucagug

SEQ ID NO: 818 - RNA, 19 nt, Artificial Sequence
  Synthetic Target Sequence/siNA sense region
gauuaugacuauuaucguu

SEQ ID NO: 819 - RNA, 19 nt, Artificial Sequence
  Synthetic Target Sequence/siNA sense region
uauaaucugccaacaaugu

SEQ ID NO: 820 - RNA, 19 nt, Artificial Sequence
  Synthetic Target Sequence/siNA sense region
ugugauaucagacaacucc

SEQ ID NO: 821 - RNA, 19 nt, Artificial Sequence
  Synthetic Target Sequence/siNA sense region
cuauucguaguugaaguug

SEQ ID NO: 822 - RNA, 19 nt, Artificial Sequence
  Synthetic Target Sequence/siNA sense region
guugauaaauacuuugauu

SEQ ID NO: 823 - RNA, 19 nt, Artificial Sequence
  Synthetic Target Sequence/siNA sense region
uguuacgaugguggcugua

SEQ ID NO: 824 - RNA, 19 nt, Artificial Sequence
  Synthetic Target Sequence/siNA sense region
auuaaugccaaccaaguaa

SEQ ID NO: 825 - RNA, 19 nt, Artificial Sequence
  Synthetic Target Sequence/siNA sense region
aucguuaacaaucuggaua

SEQ ID NO: 826 - RNA, 19 nt, Artificial Sequence
  Synthetic Target Sequence/siNA sense region
aaaucagcugguuucccau

SEQ ID NO: 827 - RNA, 19 nt, Artificial Sequence
  Synthetic Target Sequence/siNA sense region
uuuaauaaaugggguaagg

SEQ ID NO: 828 - RNA, 19 nt, Artificial Sequence
  Synthetic Target Sequence/siNA sense region
gcuagacuuuauuaugacu

SEQ ID NO: 829 - RNA, 19 nt, Artificial Sequence
  Synthetic Target Sequence/siNA sense region
ucaaugaguuaugaggauc

SEQ ID NO: 830 - RNA, 19 nt, Artificial Sequence
  Synthetic Target Sequence/siNA sense region
caagaugcacuuuucgcgu

SEQ ID NO: 831 - RNA, 19 nt, Artificial Sequence
  Synthetic Target Sequence/siNA sense region
uauacuaagcguaauguca

SEQ ID NO: 832 - RNA, 19 nt, Artificial Sequence
  Synthetic Target Sequence/siNA sense region
aucccuacuauaacucaaa

SEQ ID NO: 833 - RNA, 19 nt, Artificial Sequence
  Synthetic Target Sequence/siNA sense region
augaaucuuaaguaugcca

SEQ ID NO: 834 - RNA, 19 nt, Artificial Sequence
  Synthetic Target Sequence/siNA sense region
auuagugcaaagaauagag

SEQ ID NO: 835 - RNA, 19 nt, Artificial Sequence
  Synthetic Target Sequence/siNA sense region
gcucgcaccguagcuggug

SEQ ID NO: 836 - RNA, 19 nt, Artificial Sequence
  Synthetic Target Sequence/siNA sense region
gucucuaucuguaguacua

SEQ ID NO: 837 - RNA, 19 nt, Artificial Sequence
  Synthetic Target Sequence/siNA sense region
augacaaauagacaguuuc

SEQ ID NO: 838 - RNA, 19 nt, Artificial Sequence
  Synthetic Target Sequence/siNA sense region
caucagaaauuauugaagu

SEQ ID NO: 839 - RNA, 19 nt, Artificial Sequence
  Synthetic Target Sequence/siNA sense region
ucaauagccgccacuagag

SEQ ID NO: 840 - RNA, 19 nt, Artificial Sequence
  Synthetic Target Sequence/siNA sense region
ggagcuacugugguaauug

SEQ ID NO: 841 - RNA, 19 nt, Artificial Sequence
  Synthetic Target Sequence/siNA sense region
ggaacaagcaaguuuuacg

SEQ ID NO: 842 - RNA, 19 nt, Artificial Sequence
  Synthetic Target Sequence/siNA sense region
gguggcuggcauaauaugu

SEQ ID NO: 843 - RNA, 19 nt, Artificial Sequence
  Synthetic Target Sequence/siNA sense region
uuaaaaacuguuuacagug

SEQ ID NO: 844 - RNA, 19 nt, Artificial Sequence
  Synthetic Target Sequence/siNA sense region
gauguagaaacuccacacc

SEQ ID NO: 845 - RNA, 19 nt, Artificial Sequence
  Synthetic Target Sequence/siNA sense region
cuuauggguugggauuauc

SEQ ID NO: 846 - RNA, 19 nt, Artificial Sequence
  Synthetic Target Sequence/siNA sense region
ccaaaaugugacagagcca

SEQ ID NO: 847 - RNA, 19 nt, Artificial Sequence
  Synthetic Target Sequence/siNA sense region
augccuaacaugcuuagga

SEQ ID NO: 848 - RNA, 19 nt, Artificial Sequence
  Synthetic Target Sequence/siNA sense region
auaauggccucucuuguuc

SEQ ID NO: 849 - RNA, 19 nt, Artificial Sequence
  Synthetic Target Sequence/siNA sense region
cuugcucgcaaacauaaca

SEQ ID NO: 850 - RNA, 19 nt, Artificial Sequence
  Synthetic Target Sequence/siNA sense region
acuugcuguaacuuaucac

SEQ ID NO: 851 - RNA, 19 nt, Artificial Sequence
  Synthetic Target Sequence/siNA sense region
caccguuucuacagguuag

SEQ ID NO: 852 - RNA, 19 nt, Artificial Sequence
  Synthetic Target Sequence/siNA sense region
gcuaacgagugugcgcaag

SEQ ID NO: 853 - RNA, 19 nt, Artificial Sequence
  Synthetic Target Sequence/siNA sense region
guauuaagugagaugguca

SEQ ID NO: 854 - RNA, 19 nt, Artificial Sequence
  Synthetic Target Sequence/siNA sense region
auguguggcggcucacuau

SEQ ID NO: 855 - RNA, 19 nt, Artificial Sequence
  Synthetic Target Sequence/siNA sense region
uauguuaaaccagguggaa

SEQ ID NO: 856 - RNA, 19 nt, Artificial Sequence
  Synthetic Target Sequence/siNA sense region
acaucauccggugaugcua

SEQ ID NO: 857 - RNA, 19 nt, Artificial Sequence
  Synthetic Target Sequence/siNA sense region
acaacugcuuaugcuaaua

SEQ ID NO: 858 - RNA, 19 nt, Artificial Sequence
  Synthetic Target Sequence/siNA sense region
agugucuuuaacauuuguc

SEQ ID NO: 859 - RNA, 19 nt, Artificial Sequence
  Synthetic Target Sequence/siNA sense region
caagcuguuacagccaaug

SEQ ID NO: 860 - RNA, 19 nt, Artificial Sequence
  Synthetic Target Sequence/siNA sense region
guaaaugcacuucuuucaa

SEQ ID NO: 861 - RNA, 19 nt, Artificial Sequence
  Synthetic Target Sequence/siNA sense region
acugaugguaauaagauag

SEQ ID NO: 862 - RNA, 19 nt, Artificial Sequence
  Synthetic Target Sequence/siNA sense region
gcugacaaguauguccgca

SEQ ID NO: 863 - RNA, 19 nt, Artificial Sequence
  Synthetic Target Sequence/siNA sense region
aaucuacaacacaggcucu

SEQ ID NO: 864 - RNA, 19 nt, Artificial Sequence
  Synthetic Target Sequence/siNA sense region
uaugagugucucuauagaa

SEQ ID NO: 865 - RNA, 19 nt, Artificial Sequence
  Synthetic Target Sequence/siNA sense region
aauagggauguugaucaug

SEQ ID NO: 866 - RNA, 19 nt, Artificial Sequence
  Synthetic Target Sequence/siNA sense region
gaauucguggaugaguuuu

SEQ ID NO: 867 - RNA, 19 nt, Artificial Sequence
  Synthetic Target Sequence/siNA sense region
uacgcuuaccugcguaaac

SEQ ID NO: 868 - RNA, 19 nt, Artificial Sequence
  Synthetic Target Sequence/siNA sense region
cauuucuccaugaugauuc

SEQ ID NO: 869 - RNA, 19 nt, Artificial Sequence
  Synthetic Target Sequence/siNA sense region
cuuucugaugaugccguug

SEQ ID NO: 870 - RNA, 19 nt, Artificial Sequence
  Synthetic Target Sequence/siNA sense region
gugugcuauaacaguaacu

SEQ ID NO: 871 - RNA, 19 nt, Artificial Sequence
  Synthetic Target Sequence/siNA sense region
uaugcggcucaagguuuag

SEQ ID NO: 872 - RNA, 19 nt, Artificial Sequence
  Synthetic Target Sequence/siNA sense region
guagcuagcauuaagaacu

SEQ ID NO: 873 - RNA, 19 nt, Artificial Sequence
  Synthetic Target Sequence/siNA sense region
uuuaaggcaguucuuuauu

SEQ ID NO: 874 - RNA, 19 nt, Artificial Sequence
  Synthetic Target Sequence/siNA sense region
uaucaaaauaauguguuca

SEQ ID NO: 875 - RNA, 19 nt, Artificial Sequence
  Synthetic Target Sequence/siNA sense region
augucugaggcaaaauguu

SEQ ID NO: 876 - RNA, 19 nt, Artificial Sequence
  Synthetic Target Sequence/siNA sense region
uggacugagacugaccuua

SEQ ID NO: 877 - RNA, 19 nt, Artificial Sequence
  Synthetic Target Sequence/siNA sense region
acuaaaggaccucacgaau

SEQ ID NO: 878 - RNA, 19 nt, Artificial Sequence
  Synthetic Target Sequence/siNA sense region
uuuugcucacagcauacaa

SEQ ID NO: 879 - RNA, 19 nt, Artificial Sequence
  Synthetic Target Sequence/siNA sense region
augcuaguuaaacaaggag

SEQ ID NO: 880 - RNA, 19 nt, Artificial Sequence
  Synthetic Target Sequence/siNA sense region
gaugauuacguguaccugc

SEQ ID NO: 881 - RNA, 19 nt, Artificial Sequence
  Synthetic Target Sequence/siNA sense region
ccuuacccagauccaucaa

SEQ ID NO: 882 - RNA, 19 nt, Artificial Sequence
  Synthetic Target Sequence/siNA sense region
agaauauuaggcgcaggcu

SEQ ID NO: 883 - RNA, 19 nt, Artificial Sequence
  Synthetic Target Sequence/siNA sense region
uguuuugucgaugauauug

SEQ ID NO: 884 - RNA, 19 nt, Artificial Sequence
  Synthetic Target Sequence/siNA sense region
gucaaaacagaugguacac

SEQ ID NO: 885 - RNA, 19 nt, Artificial Sequence
  Synthetic Target Sequence/siNA sense region
cuuaugauugaaagguucg

SEQ ID NO: 886 - RNA, 19 nt, Artificial Sequence
  Synthetic Target Sequence/siNA sense region
gugucacuggcuauugaug

SEQ ID NO: 887 - RNA, 19 nt, Artificial Sequence
  Synthetic Target Sequence/siNA sense region
gcuuacccacuuacaaaac

SEQ ID NO: 888 - RNA, 19 nt, Artificial Sequence
  Synthetic Target Sequence/siNA sense region
cauccuaaucaggaguaug

SEQ ID NO: 889 - RNA, 19 nt, Artificial Sequence
  Synthetic Target Sequence/siNA sense region
gcugaugucuuucacuugu

SEQ ID NO: 890 - RNA, 19 nt, Artificial Sequence
  Synthetic Target Sequence/siNA sense region
uauuuacaauacauuagaa

SEQ ID NO: 891 - RNA, 19 nt, Artificial Sequence
  Synthetic Target Sequence/siNA sense region
aaguuacaugaugagcuua

SEQ ID NO: 892 - RNA, 19 nt, Artificial Sequence
  Synthetic Target Sequence/siNA sense region
acuggccacauguuggaca

SEQ ID NO: 893 - RNA, 19 nt, Artificial Sequence
  Synthetic Target Sequence/siNA sense region
auguauuccguaaugcuaa

SEQ ID NO: 894 - RNA, 19 nt, Artificial Sequence
  Synthetic Target Sequence/siNA sense region
acuaaugauaacaccucac

SEQ ID NO: 895 - RNA, 19 nt, Artificial Sequence
  Synthetic Target Sequence/siNA sense region
cgguacugggaaccugagu

SEQ ID NO: 896 - RNA, 19 nt, Artificial Sequence
  Synthetic Target Sequence/siNA sense region
uuuuaugaggcuauguaca

SEQ ID NO: 897 - RNA, 19 nt, Artificial Sequence
  Synthetic Target Sequence/siNA sense region
acaccacauacagucuugc

SEQ ID NO: 898 - RNA, 19 nt, Artificial Sequence
  Synthetic Target Sequence/siNA sense region
caggcuguaggugcuugug

SEQ ID NO: 899 - RNA, 19 nt, Artificial Sequence
  Synthetic Target Sequence/siNA sense region
guauugugcaauucacaga

SEQ ID NO: 900 - RNA, 19 nt, Artificial Sequence
  Synthetic Target Sequence/siNA sense region
acuucacuucguugcggug

SEQ ID NO: 901 - RNA, 19 nt, Artificial Sequence
  Synthetic Target Sequence/siNA sense region
gccuguauuaggagaccau

SEQ ID NO: 902 - RNA, 19 nt, Artificial Sequence
  Synthetic Target Sequence/siNA sense region
uuccuauguugcaagugcu

SEQ ID NO: 903 - RNA, 19 nt, Artificial Sequence
  Synthetic Target Sequence/siNA sense region
ugcuaugaccaugucauuu

SEQ ID NO: 904 - RNA, 19 nt, Artificial Sequence
  Synthetic Target Sequence/siNA sense region
ucaacaucacacaaauuag

SEQ ID NO: 905 - RNA, 19 nt, Artificial Sequence
  Synthetic Target Sequence/siNA sense region
guguugucuguuaaucccu

SEQ ID NO: 906 - RNA, 19 nt, Artificial Sequence
  Synthetic Target Sequence/siNA sense region
uauguuugcaaugccccag

SEQ ID NO: 907 - RNA, 19 nt, Artificial Sequence
  Synthetic Target Sequence/siNA sense region
gguugugaugucacugaug

SEQ ID NO: 908 - RNA, 19 nt, Artificial Sequence
  Synthetic Target Sequence/siNA sense region
gugacacaacuguaucuag

SEQ ID NO: 909 - RNA, 19 nt, Artificial Sequence
  Synthetic Target Sequence/siNA sense region
ggagguaugagcuauuauu

SEQ ID NO: 910 - RNA, 19 nt, Artificial Sequence
  Synthetic Target Sequence/siNA sense region
ugcaagucacauaagccuc

SEQ ID NO: 911 - RNA, 19 nt, Artificial Sequence
  Synthetic Target Sequence/siNA sense region
cccauuaguuuuccauuau

SEQ ID NO: 912 - RNA, 19 nt, Artificial Sequence
  Synthetic Target Sequence/siNA sense region
ugugcuaauggucagguuu

SEQ ID NO: 913 - RNA, 19 nt, Artificial Sequence
  Synthetic Target Sequence/siNA sense region
uuugguuuauacaaaaaca

SEQ ID NO: 914 - RNA, 19 nt, Artificial Sequence
  Synthetic Target Sequence/siNA sense region
acauguguaggcagugaca

SEQ ID NO: 915 - RNA, 19 nt, Artificial Sequence
  Synthetic Target Sequence/siNA sense region
aaugucacugacuucaaug

SEQ ID NO: 916 - RNA, 19 nt, Artificial Sequence
  Synthetic Target Sequence/siNA sense region
gcgauagcaacaugugauu

SEQ ID NO: 917 - RNA, 19 nt, Artificial Sequence
  Synthetic Target Sequence/siNA sense region
uggacuaaugcuggcgauu

SEQ ID NO: 918 - RNA, 19 nt, Artificial Sequence
  Synthetic Target Sequence/siNA sense region
uacauacuugccaacacuu

SEQ ID NO: 919 - RNA, 19 nt, Artificial Sequence
  Synthetic Target Sequence/siNA sense region
uguacugagagacucaagc

SEQ ID NO: 920 - RNA, 19 nt, Artificial Sequence
  Synthetic Target Sequence/siNA sense region
cuuuucgcagcagaaacgc

SEQ ID NO: 921 - RNA, 19 nt, Artificial Sequence
  Synthetic Target Sequence/siNA sense region
cucaaagccacugaggaaa

SEQ ID NO: 922 - RNA, 19 nt, Artificial Sequence
  Synthetic Target Sequence/siNA sense region
acauuuaagcugucauaug

SEQ ID NO: 923 - RNA, 19 nt, Artificial Sequence
  Synthetic Target Sequence/siNA sense region
gguauugccacuguacgcg

SEQ ID NO: 924 - RNA, 19 nt, Artificial Sequence
  Synthetic Target Sequence/siNA sense region
gaaguacucucugacagag

SEQ ID NO: 925 - RNA, 19 nt, Artificial Sequence
  Synthetic Target Sequence/siNA sense region
gaauugcaucuuucauggg

SEQ ID NO: 926 - RNA, 19 nt, Artificial Sequence
  Synthetic Target Sequence/siNA sense region
gagguuggaaaaccuagac

SEQ ID NO: 927 - RNA, 19 nt, Artificial Sequence
  Synthetic Target Sequence/siNA sense region
ccaccauugaacagaaacu

SEQ ID NO: 928 - RNA, 19 nt, Artificial Sequence
  Synthetic Target Sequence/siNA sense region
uaugucuuuacugguuacc

SEQ ID NO: 929 - RNA, 19 nt, Artificial Sequence
  Synthetic Target Sequence/siNA sense region
cguguaacuaaaaauagua

SEQ ID NO: 930 - RNA, 19 nt, Artificial Sequence
  Synthetic Target Sequence/siNA sense region
aaaguacagauuggagagu

SEQ ID NO: 931 - RNA, 19 nt, Artificial Sequence
  Synthetic Target Sequence/siNA sense region
uacaccuuugaaaaaggug

SEQ ID NO: 932 - RNA, 19 nt, Artificial Sequence
  Synthetic Target Sequence/siNA sense region
gacuauggugaugcuguug

SEQ ID NO: 933 - RNA, 19 nt, Artificial Sequence
  Synthetic Target Sequence/siNA sense region
guguacagagguacuacga

SEQ ID NO: 934 - RNA, 19 nt, Artificial Sequence
  Synthetic Target Sequence/siNA sense region
acauacaaguugaauguug

SEQ ID NO: 935 - RNA, 19 nt, Artificial Sequence
  Synthetic Target Sequence/siNA sense region
ggugauuacuuuguguuga

SEQ ID NO: 936 - RNA, 19 nt, Artificial Sequence
  Synthetic Target Sequence/siNA sense region
acaucucacacuguaaugc

SEQ ID NO: 937 - RNA, 19 nt, Artificial Sequence
  Synthetic Target Sequence/siNA sense region
ccacuuagugcaccuacuc

SEQ ID NO: 938 - RNA, 19 nt, Artificial Sequence
  Synthetic Target Sequence/siNA sense region
cuagugccacaagagcacu

SEQ ID NO: 939 - RNA, 19 nt, Artificial Sequence
  Synthetic Target Sequence/siNA sense region
uaugugagaauuacuggcu

SEQ ID NO: 940 - RNA, 19 nt, Artificial Sequence
  Synthetic Target Sequence/siNA sense region
uuguacccaacacucaaca

SEQ ID NO: 941 - RNA, 19 nt, Artificial Sequence
  Synthetic Target Sequence/siNA sense region
aucucagaugaguuuucua

SEQ ID NO: 942 - RNA, 19 nt, Artificial Sequence
  Synthetic Target Sequence/siNA sense region
agcaauguugcaaauuauc

SEQ ID NO: 943 - RNA, 19 nt, Artificial Sequence
  Synthetic Target Sequence/siNA sense region
caaaaggucggcaugcaaa

SEQ ID NO: 944 - RNA, 19 nt, Artificial Sequence
  Synthetic Target Sequence/siNA sense region
aaguacucuacacuccaag

SEQ ID NO: 945 - RNA, 19 nt, Artificial Sequence
  Synthetic Target Sequence/siNA sense region
ggaccaccugguacuggua

SEQ ID NO: 946 - RNA, 19 nt, Artificial Sequence
  Synthetic Target Sequence/siNA sense region
aagagucauuuugccaucg

SEQ ID NO: 947 - RNA, 19 nt, Artificial Sequence
  Synthetic Target Sequence/siNA sense region
ggacuugcucucuauuacc

SEQ ID NO: 948 - RNA, 19 nt, Artificial Sequence
  Synthetic Target Sequence/siNA sense region
ccaucugcucgcauagugu

SEQ ID NO: 949 - RNA, 19 nt, Artificial Sequence
  Synthetic Target Sequence/siNA sense region
uauacggcaugcucucaug

SEQ ID NO: 950 - RNA, 19 nt, Artificial Sequence
  Synthetic Target Sequence/siNA sense region
gcagcuguugaugcccuau

SEQ ID NO: 951 - RNA, 19 nt, Artificial Sequence
  Synthetic Target Sequence/siNA sense region
ugugaaaaggcauuaaaau

SEQ ID NO: 952 - RNA, 19 nt, Artificial Sequence
  Synthetic Target Sequence/siNA sense region
uauuugcccauagauaaau

SEQ ID NO: 953 - RNA, 19 nt, Artificial Sequence
  Synthetic Target Sequence/siNA sense region
uguaguagaaucauaccug

SEQ ID NO: 954 - RNA, 19 nt, Artificial Sequence
  Synthetic Target Sequence/siNA sense region
gcgcgugcgcgcguagagu

SEQ ID NO: 955 - RNA, 19 nt, Artificial Sequence
  Synthetic Target Sequence/siNA sense region
uguuuugauaaauucaaag

SEQ ID NO: 956 - RNA, 19 nt, Artificial Sequence
  Synthetic Target Sequence/siNA sense region
gugaauucaacacuagaac

SEQ ID NO: 957 - RNA, 19 nt, Artificial Sequence
  Synthetic Target Sequence/siNA sense region
caguauguuuucugcacug

SEQ ID NO: 958 - RNA, 19 nt, Artificial Sequence
  Synthetic Target Sequence/siNA sense region
guaaaugcauugccagaaa

SEQ ID NO: 959 - RNA, 19 nt, Artificial Sequence
  Synthetic Target Sequence/siNA sense region
acaacugcugacauuguag

SEQ ID NO: 960 - RNA, 19 nt, Artificial Sequence
  Synthetic Target Sequence/siNA sense region
gucuuugaugaaaucucua

SEQ ID NO: 961 - RNA, 19 nt, Artificial Sequence
  Synthetic Target Sequence/siNA sense region
auggcuacuaauuaugacu

SEQ ID NO: 962 - RNA, 19 nt, Artificial Sequence
  Synthetic Target Sequence/siNA sense region
uugaguguugucaaugcua

SEQ ID NO: 963 - RNA, 19 nt, Artificial Sequence
  Synthetic Target Sequence/siNA sense region
agacuucgugcaaaacacu

SEQ ID NO: 964 - RNA, 19 nt, Artificial Sequence
  Synthetic Target Sequence/siNA sense region
uacgucuauauuggcgauc

SEQ ID NO: 965 - RNA, 19 nt, Artificial Sequence
  Synthetic Target Sequence/siNA sense region
ccugcucaauuaccagccc

SEQ ID NO: 966 - RNA, 19 nt, Artificial Sequence
  Synthetic Target Sequence/siNA sense region
ccccgcacauugcugacua

SEQ ID NO: 967 - RNA, 19 nt, Artificial Sequence
  Synthetic Target Sequence/siNA sense region
aaaggcacacuagaaccag

SEQ ID NO: 968 - RNA, 19 nt, Artificial Sequence
  Synthetic Target Sequence/siNA sense region
gaauauuuuaauucagugu

SEQ ID NO: 969 - RNA, 19 nt, Artificial Sequence
  Synthetic Target Sequence/siNA sense region
ugcagacuuaugaaaacaa

SEQ ID NO: 970 - RNA, 19 nt, Artificial Sequence
  Synthetic Target Sequence/siNA sense region
auagguccagacauguucc

SEQ ID NO: 971 - RNA, 19 nt, Artificial Sequence
  Synthetic Target Sequence/siNA sense region
cuuggaacuugucgccguu

SEQ ID NO: 972 - RNA, 19 nt, Artificial Sequence
  Synthetic Target Sequence/siNA sense region
uguccugcugaaauuguug

SEQ ID NO: 973 - RNA, 19 nt, Artificial Sequence
  Synthetic Target Sequence/siNA sense region
gacacugugagugcuuuag

SEQ ID NO: 974 - RNA, 19 nt, Artificial Sequence
  Synthetic Target Sequence/siNA sense region
guuuaugacaauaagcuaa

SEQ ID NO: 975 - RNA, 19 nt, Artificial Sequence
  Synthetic Target Sequence/siNA sense region
aaagcacacaaggauaagu

SEQ ID NO: 976 - RNA, 19 nt, Artificial Sequence
  Synthetic Target Sequence/siNA sense region
ucagcucaaugcuucaaaa

SEQ ID NO: 977 - RNA, 19 nt, Artificial Sequence
  Synthetic Target Sequence/siNA sense region
auguucuacaaagguguua

SEQ ID NO: 978 - RNA, 19 nt, Artificial Sequence
  Synthetic Target Sequence/siNA sense region
auuacacaugauguuucau

SEQ ID NO: 979 - RNA, 19 nt, Artificial Sequence
  Synthetic Target Sequence/siNA sense region
ucugcaaucaacagaccuc

SEQ ID NO: 980 - RNA, 19 nt, Artificial Sequence
  Synthetic Target Sequence/siNA sense region
caaauaggcguuguaagag

SEQ ID NO: 981 - RNA, 19 nt, Artificial Sequence
  Synthetic Target Sequence/siNA sense region
gaauuucuuacacgcaauc

SEQ ID NO: 982 - RNA, 19 nt, Artificial Sequence
  Synthetic Target Sequence/siNA sense region
ccugcuuggagaaaagcug

SEQ ID NO: 983 - RNA, 19 nt, Artificial Sequence
  Synthetic Target Sequence/siNA sense region
guuuuuaucucaccuuaua

SEQ ID NO: 984 - RNA, 19 nt, Artificial Sequence
  Synthetic Target Sequence/siNA sense region
aauucacagaacgcuguag

SEQ ID NO: 985 - RNA, 19 nt, Artificial Sequence
  Synthetic Target Sequence/siNA sense region
gcuucaaaaaucuuaggau

SEQ ID NO: 986 - RNA, 19 nt, Artificial Sequence
  Synthetic Target Sequence/siNA sense region
uugccuacgcagacuguug

SEQ ID NO: 987 - RNA, 19 nt, Artificial Sequence
  Synthetic Target Sequence/siNA sense region
gauucaucacaggguucug

SEQ ID NO: 988 - RNA, 19 nt, Artificial Sequence
  Synthetic Target Sequence/siNA sense region
gaauaugacuaugucauau

SEQ ID NO: 989 - RNA, 19 nt, Artificial Sequence
  Synthetic Target Sequence/siNA sense region
uucacacaaacuacugaaa

SEQ ID NO: 990 - RNA, 19 nt, Artificial Sequence
  Synthetic Target Sequence/siNA sense region
acagcacacucuuguaaug

SEQ ID NO: 991 - RNA, 19 nt, Artificial Sequence
  Synthetic Target Sequence/siNA sense region
gucaaccgcuucaaugugg

SEQ ID NO: 992 - RNA, 19 nt, Artificial Sequence
  Synthetic Target Sequence/siNA sense region
gcuaucacaagggcaaaaa

SEQ ID NO: 993 - RNA, 19 nt, Artificial Sequence
  Synthetic Target Sequence/siNA sense region
auuggcauuuugugcauaa

SEQ ID NO: 994 - RNA, 19 nt, Artificial Sequence
  Synthetic Target Sequence/siNA sense region
augucugauagagaucuuu

SEQ ID NO: 995 - RNA, 19 nt, Artificial Sequence
  Synthetic Target Sequence/siNA sense region
uaugacaaacugcaauuua

SEQ ID NO: 996 - RNA, 19 nt, Artificial Sequence
  Synthetic Target Sequence/siNA sense region
acaagucuagaaauaccac

SEQ ID NO: 997 - RNA, 19 nt, Artificial Sequence
  Synthetic Target Sequence/siNA sense region
cgucgcaauguggcuacau

SEQ ID NO: 998 - RNA, 19 nt, Artificial Sequence
  Synthetic Target Sequence/siNA sense region
uuacaagcagaaaauguaa

SEQ ID NO: 999 - RNA, 19 nt, Artificial Sequence
  Synthetic Target Sequence/siNA sense region
acuggacuuuuuaaggacu

SEQ ID NO: 1000 - RNA, 19 nt, Artificial Sequence
  Synthetic Target Sequence/siNA sense region
uguaguaagaucauuacug

SEQ ID NO: 1001 - RNA, 19 nt, Artificial Sequence
  Synthetic Target Sequence/siNA sense region
ggucuucauccuacacagg

SEQ ID NO: 1002 - RNA, 19 nt, Artificial Sequence
  Synthetic Target Sequence/siNA sense region
gcaccuacacaccucagcg

SEQ ID NO: 1003 - RNA, 19 nt, Artificial Sequence
  Synthetic Target Sequence/siNA sense region
guugauauaaaguucaaga

SEQ ID NO: 1004 - RNA, 19 nt, Artificial Sequence
  Synthetic Target Sequence/siNA sense region
acugaaggauuauguguug

SEQ ID NO: 1005 - RNA, 19 nt, Artificial Sequence
  Synthetic Target Sequence/siNA sense region
gacauaccaggcauaccaa

SEQ ID NO: 1006 - RNA, 19 nt, Artificial Sequence
  Synthetic Target Sequence/siNA sense region
aaggacaugaccuaccgua

SEQ ID NO: 1007 - RNA, 19 nt, Artificial Sequence
  Synthetic Target Sequence/siNA sense region
agacucaucucuaugaugg

SEQ ID NO: 1008 - RNA, 19 nt, Artificial Sequence
  Synthetic Target Sequence/siNA sense region
gguuucaaaaugaauuacc

SEQ ID NO: 1009 - RNA, 19 nt, Artificial Sequence
  Synthetic Target Sequence/siNA sense region
caagucaaugguuacccua

SEQ ID NO: 1010 - RNA, 19 nt, Artificial Sequence
  Synthetic Target Sequence/siNA sense region
aauauguuuaucacccgcg

SEQ ID NO: 1011 - RNA, 19 nt, Artificial Sequence
  Synthetic Target Sequence/siNA sense region
gaagaagcuauucgucacg

SEQ ID NO: 1012 - RNA, 19 nt, Artificial Sequence
  Synthetic Target Sequence/siNA sense region
guucgugcguggauuggcu

SEQ ID NO: 1013 - RNA, 19 nt, Artificial Sequence
  Synthetic Target Sequence/siNA sense region
uuugauguagagggcuguc

SEQ ID NO: 1014 - RNA, 19 nt, Artificial Sequence
  Synthetic Target Sequence/siNA sense region
caugcaacuagagaugcug

SEQ ID NO: 1015 - RNA, 19 nt, Artificial Sequence
  Synthetic Target Sequence/siNA sense region
guggguacuaaccuaccuc

SEQ ID NO: 1016 - RNA, 19 nt, Artificial Sequence
  Synthetic Target Sequence/siNA sense region
cuccagcuaggauuuucua

SEQ ID NO: 1017 - RNA, 19 nt, Artificial Sequence
  Synthetic Target Sequence/siNA sense region
acagguguuaacuuaguag

SEQ ID NO: 1018 - RNA, 19 nt, Artificial Sequence
  Synthetic Target Sequence/siNA sense region
gcuguaccgacugguuaug

SEQ ID NO: 1019 - RNA, 19 nt, Artificial Sequence
  Synthetic Target Sequence/siNA sense region
guugacacugaaaauaaca

SEQ ID NO: 1020 - RNA, 19 nt, Artificial Sequence
  Synthetic Target Sequence/siNA sense region
acagaauucaccagaguua

SEQ ID NO: 1021 - RNA, 19 nt, Artificial Sequence
  Synthetic Target Sequence/siNA sense region
aaugcaaaaccuccaccag

SEQ ID NO: 1022 - RNA, 19 nt, Artificial Sequence
  Synthetic Target Sequence/siNA sense region
ggugaccaguuuaaacauc

SEQ ID NO: 1023 - RNA, 19 nt, Artificial Sequence
  Synthetic Target Sequence/siNA sense region
cuuauaccacucauguaua

SEQ ID NO: 1024 - RNA, 19 nt, Artificial Sequence
  Synthetic Target Sequence/siNA sense region
aaaggcuugcccuggaaug

SEQ ID NO: 1025 - RNA, 19 nt, Artificial Sequence
  Synthetic Target Sequence/siNA sense region
guagugcguauuaagauag

SEQ ID NO: 1026 - RNA, 19 nt, Artificial Sequence
  Synthetic Target Sequence/siNA sense region
guacaaaugcucagugaua

SEQ ID NO: 1027 - RNA, 19 nt, Artificial Sequence
  Synthetic Target Sequence/siNA sense region
acacugaaaggauugucag

SEQ ID NO: 1028 - RNA, 19 nt, Artificial Sequence
  Synthetic Target Sequence/siNA sense region
gacagagucguguucgucc

SEQ ID NO: 1029 - RNA, 19 nt, Artificial Sequence
  Synthetic Target Sequence/siNA sense region
cuuugggcgcauggcuuug

SEQ ID NO: 1030 - RNA, 19 nt, Artificial Sequence
  Synthetic Target Sequence/siNA sense region
gagcuuacaucaaugaagu

SEQ ID NO: 1031 - RNA, 19 nt, Artificial Sequence
  Synthetic Target Sequence/siNA sense region
uacuuugucaagauuggac

SEQ ID NO: 1032 - RNA, 19 nt, Artificial Sequence
  Synthetic Target Sequence/siNA sense region
ccugaaagaacguguuguc

SEQ ID NO: 1033 - RNA, 19 nt, Artificial Sequence
  Synthetic Target Sequence/siNA sense region
cugugugacaaacgugcaa

SEQ ID NO: 1034 - RNA, 19 nt, Artificial Sequence
  Synthetic Target Sequence/siNA sense region
acuugcuuuucuacuucau

SEQ ID NO: 1035 - RNA, 19 nt, Artificial Sequence
  Synthetic Target Sequence/siNA sense region
ucagauacuuaugccugcu

SEQ ID NO: 1036 - RNA, 19 nt, Artificial Sequence
  Synthetic Target Sequence/siNA sense region
uggaaucauucuguggguu

SEQ ID NO: 1037 - RNA, 19 nt, Artificial Sequence
  Synthetic Target Sequence/siNA sense region
uuugacuaugucuauaacc

SEQ ID NO: 1038 - RNA, 19 nt, Artificial Sequence
  Synthetic Target Sequence/siNA sense region
ccauuuaugauugauguuc

SEQ ID NO: 1039 - RNA, 19 nt, Artificial Sequence
  Synthetic Target Sequence/siNA sense region
cagcaguggggcuuuacgg

SEQ ID NO: 1040 - RNA, 19 nt, Artificial Sequence
  Synthetic Target Sequence/siNA sense region
gguaaccuucagaguaacc

SEQ ID NO: 1041 - RNA, 19 nt, Artificial Sequence
  Synthetic Target Sequence/siNA sense region
caugaccaacauugccagg

SEQ ID NO: 1042 - RNA, 19 nt, Artificial Sequence
  Synthetic Target Sequence/siNA sense region
guacauggaaaugcacaug

SEQ ID NO: 1043 - RNA, 19 nt, Artificial Sequence
  Synthetic Target Sequence/siNA sense region
guggcuaguugugaugcua

SEQ ID NO: 1044 - RNA, 19 nt, Artificial Sequence
  Synthetic Target Sequence/siNA sense region
aucaugacuagauguuuag

SEQ ID NO: 1045 - RNA, 19 nt, Artificial Sequence
  Synthetic Target Sequence/siNA sense region
gcaguccaugagugcuuug

SEQ ID NO: 1046 - RNA, 19 nt, Artificial Sequence
  Synthetic Target Sequence/siNA sense region
guuaagcgcguugauuggu

SEQ ID NO: 1047 - RNA, 19 nt, Artificial Sequence
  Synthetic Target Sequence/siNA sense region
ucuguugaauacccuauua

SEQ ID NO: 1048 - RNA, 19 nt, Artificial Sequence
  Synthetic Target Sequence/siNA sense region
auaggagaugaacugaggg

SEQ ID NO: 1049 - RNA, 19 nt, Artificial Sequence
  Synthetic Target Sequence/siNA sense region
guuaauucugcuugcagaa

SEQ ID NO: 1050 - RNA, 19 nt, Artificial Sequence
  Synthetic Target Sequence/siNA sense region
aaaguacaacacaugguug

SEQ ID NO: 1051 - RNA, 19 nt, Artificial Sequence
  Synthetic Target Sequence/siNA sense region
gugaagucugcauugcuug

SEQ ID NO: 1052 - RNA, 19 nt, Artificial Sequence
  Synthetic Target Sequence/siNA sense region
gcugauaaguuuccaguuc

SEQ ID NO: 1053 - RNA, 19 nt, Artificial Sequence
  Synthetic Target Sequence/siNA sense region
cuucaugacauuggaaauc

SEQ ID NO: 1054 - RNA, 19 nt, Artificial Sequence
  Synthetic Target Sequence/siNA sense region
ccaaaggcuaucaagugug

SEQ ID NO: 1055 - RNA, 19 nt, Artificial Sequence
  Synthetic Target Sequence/siNA sense region
gugccucaggcugaaguag

SEQ ID NO: 1056 - RNA, 19 nt, Artificial Sequence
  Synthetic Target Sequence/siNA sense region
gaauggaaguucuacgaug

SEQ ID NO: 1057 - RNA, 19 nt, Artificial Sequence
  Synthetic Target Sequence/siNA sense region
gcucagccauguagugaca

SEQ ID NO: 1058 - RNA, 19 nt, Artificial Sequence
  Synthetic Target Sequence/siNA sense region
aaagcuuacaaaauagagg

SEQ ID NO: 1059 - RNA, 19 nt, Artificial Sequence
  Synthetic Target Sequence/siNA sense region
gaacucuucuauucuuaug

SEQ ID NO: 1060 - RNA, 19 nt, Artificial Sequence
  Synthetic Target Sequence/siNA sense region
gcuacacaucacgauaaau

SEQ ID NO: 1061 - RNA, 19 nt, Artificial Sequence
  Synthetic Target Sequence/siNA sense region
uucacugaugguguuuguu

SEQ ID NO: 1062 - RNA, 19 nt, Artificial Sequence
  Synthetic Target Sequence/siNA sense region
uuguuuuggaauuguaacg

SEQ ID NO: 1063 - RNA, 19 nt, Artificial Sequence
  Synthetic Target Sequence/siNA sense region
guugaucguuacccagcca

SEQ ID NO: 1064 - RNA, 19 nt, Artificial Sequence
  Synthetic Target Sequence/siNA sense region
aaugcaauuguguguaggu

SEQ ID NO: 1065 - RNA, 19 nt, Artificial Sequence
  Synthetic Target Sequence/siNA sense region
uuugacacaagagucuugu

SEQ ID NO: 1066 - RNA, 19 nt, Artificial Sequence
  Synthetic Target Sequence/siNA sense region
ucaaacuugaacuuaccag

SEQ ID NO: 1067 - RNA, 19 nt, Artificial Sequence
  Synthetic Target Sequence/siNA sense region
ggcugugauggugguaguu

SEQ ID NO: 1068 - RNA, 19 nt, Artificial Sequence
  Synthetic Target Sequence/siNA sense region
uuguaugugaauaagcaug

SEQ ID NO: 1069 - RNA, 19 nt, Artificial Sequence
  Synthetic Target Sequence/siNA sense region
gcauuccacacuccagcuu

SEQ ID NO: 1070 - RNA, 19 nt, Artificial Sequence
  Synthetic Target Sequence/siNA sense region
uucgauaaaagugcauuua

SEQ ID NO: 1071 - RNA, 19 nt, Artificial Sequence
  Synthetic Target Sequence/siNA sense region
acuaauuuaaagcaauugc

SEQ ID NO: 1072 - RNA, 19 nt, Artificial Sequence
  Synthetic Target Sequence/siNA sense region
ccuuucuuuuacuauucug

SEQ ID NO: 1073 - RNA, 19 nt, Artificial Sequence
  Synthetic Target Sequence/siNA sense region
gauaguccuugugagucuc

SEQ ID NO: 1074 - RNA, 19 nt, Artificial Sequence
  Synthetic Target Sequence/siNA sense region
cauggcaaacaaguagugu

SEQ ID NO: 1075 - RNA, 19 nt, Artificial Sequence
  Synthetic Target Sequence/siNA sense region
ucggauauugauuauguuc

SEQ ID NO: 1076 - RNA, 19 nt, Artificial Sequence
  Synthetic Target Sequence/siNA sense region
ccacucaaaucugcuacgu

SEQ ID NO: 1077 - RNA, 19 nt, Artificial Sequence
  Synthetic Target Sequence/siNA sense region
uguauuacacgaugcaauu

SEQ ID NO: 1078 - RNA, 19 nt, Artificial Sequence
  Synthetic Target Sequence/siNA sense region
uuagguggugcuguuugca

SEQ ID NO: 1079 - RNA, 19 nt, Artificial Sequence
  Synthetic Target Sequence/siNA sense region
agacaccaugcaaaugagu

SEQ ID NO: 1080 - RNA, 19 nt, Artificial Sequence
  Synthetic Target Sequence/siNA sense region
uaccgacaguacuuggaug

SEQ ID NO: 1081 - RNA, 19 nt, Artificial Sequence
  Synthetic Target Sequence/siNA sense region
gcauauaauaugaugauuu

SEQ ID NO: 1082 - RNA, 19 nt, Artificial Sequence
  Synthetic Target Sequence/siNA sense region
ucugcuggauuuagccuau

SEQ ID NO: 1083 - RNA, 19 nt, Artificial Sequence
  Synthetic Target Sequence/siNA sense region
uggauuuacaaacaauuug

SEQ ID NO: 1084 - RNA, 19 nt, Artificial Sequence
  Synthetic Target Sequence/siNA sense region
gauacuuauaaccugugga

SEQ ID NO: 1085 - RNA, 19 nt, Artificial Sequence
  Synthetic Target Sequence/siNA sense region
aauacauuuaccagguuac

SEQ ID NO: 1086 - RNA, 19 nt, Artificial Sequence
  Synthetic Target Sequence/siNA sense region
cagaguuuagaaaaugugg

SEQ ID NO: 1087 - RNA, 19 nt, Artificial Sequence
  Synthetic Target Sequence/siNA sense region
gcuuauaauguuguuaaua

SEQ ID NO: 1088 - RNA, 19 nt, Artificial Sequence
  Synthetic Target Sequence/siNA sense region
aaaggacacuuugauggac

SEQ ID NO: 1089 - RNA, 19 nt, Artificial Sequence
  Synthetic Target Sequence/siNA sense region
cacgccggcgaagcaccug

SEQ ID NO: 1090 - RNA, 19 nt, Artificial Sequence
  Synthetic Target Sequence/siNA sense region
guuuccaucauuaauaaug

SEQ ID NO: 1091 - RNA, 19 nt, Artificial Sequence
  Synthetic Target Sequence/siNA sense region
gcuguuuacacaaagguag

SEQ ID NO: 1092 - RNA, 19 nt, Artificial Sequence
  Synthetic Target Sequence/siNA sense region
gaugguauugauguggaga

SEQ ID NO: 1093 - RNA, 19 nt, Artificial Sequence
  Synthetic Target Sequence/siNA sense region
aucuuugaaaauaagacaa

SEQ ID NO: 1094 - RNA, 19 nt, Artificial Sequence
  Synthetic Target Sequence/siNA sense region
acacuuccuguuaauguug

SEQ ID NO: 1095 - RNA, 19 nt, Artificial Sequence
  Synthetic Target Sequence/siNA sense region
gcauuugagcuuugggcua

SEQ ID NO: 1096 - RNA, 19 nt, Artificial Sequence
  Synthetic Target Sequence/siNA sense region
aagcguaacauuaaaccag

SEQ ID NO: 1097 - RNA, 19 nt, Artificial Sequence
  Synthetic Target Sequence/siNA sense region
gugccagagauuaagauac

SEQ ID NO: 1098 - RNA, 19 nt, Artificial Sequence
  Synthetic Target Sequence/siNA sense region
cucaauaauuuggguguug

SEQ ID NO: 1099 - RNA, 19 nt, Artificial Sequence
  Synthetic Target Sequence/siNA sense region
gauaucgcugcuaauacug

SEQ ID NO: 1100 - RNA, 19 nt, Artificial Sequence
  Synthetic Target Sequence/siNA sense region
guaaucugggacuacaaaa

SEQ ID NO: 1101 - RNA, 19 nt, Artificial Sequence
  Synthetic Target Sequence/siNA sense region
agagaagccccagcacaug

SEQ ID NO: 1102 - RNA, 19 nt, Artificial Sequence
  Synthetic Target Sequence/siNA sense region
guaucuacaauaggugucu

SEQ ID NO: 1103 - RNA, 19 nt, Artificial Sequence
  Synthetic Target Sequence/siNA sense region
ugcacaaugacugacauug

SEQ ID NO: 1104 - RNA, 19 nt, Artificial Sequence
  Synthetic Target Sequence/siNA sense region
gccaagaaaccuacugaga

SEQ ID NO: 1105 - RNA, 19 nt, Artificial Sequence
  Synthetic Target Sequence/siNA sense region
agugcuuguucuucacuua

SEQ ID NO: 1106 - RNA, 19 nt, Artificial Sequence
  Synthetic Target Sequence/siNA sense region
acugucuuguuugauggua

SEQ ID NO: 1107 - RNA, 19 nt, Artificial Sequence
  Synthetic Target Sequence/siNA sense region
agaguggaaggacagguag

SEQ ID NO: 1108 - RNA, 19 nt, Artificial Sequence
  Synthetic Target Sequence/siNA sense region
gaccuuuuuagaaacgccc

SEQ ID NO: 1109 - RNA, 19 nt, Artificial Sequence
  Synthetic Target Sequence/siNA sense region
cguaaugguguuuuaauaa

SEQ ID NO: 1110 - RNA, 19 nt, Artificial Sequence
  Synthetic Target Sequence/siNA sense region
acagaagguucagucaaag

SEQ ID NO: 1111 - RNA, 19 nt, Artificial Sequence
  Synthetic Target Sequence/siNA sense region
ggucuaacaccuucaaagg

SEQ ID NO: 1112 - RNA, 19 nt, Artificial Sequence
  Synthetic Target Sequence/siNA sense region
ggaccagcacaagcuagcg

SEQ ID NO: 1113 - RNA, 19 nt, Artificial Sequence
  Synthetic Target Sequence/siNA sense region
gucaauggagucacauuaa

SEQ ID NO: 1114 - RNA, 19 nt, Artificial Sequence
  Synthetic Target Sequence/siNA sense region
auuggagaaucaguaaaaa

SEQ ID NO: 1115 - RNA, 19 nt, Artificial Sequence
  Synthetic Target Sequence/siNA sense region
acacaguuuaacuacuuua

SEQ ID NO: 1116 - RNA, 19 nt, Artificial Sequence
  Synthetic Target Sequence/siNA sense region
aagaaaguagacggcauua

SEQ ID NO: 1117 - RNA, 19 nt, Artificial Sequence
  Synthetic Target Sequence/siNA sense region
auucaacaguugccugaaa

SEQ ID NO: 1118 - RNA, 19 nt, Artificial Sequence
  Synthetic Target Sequence/siNA sense region
accuacuuuacucagagca

SEQ ID NO: 1119 - RNA, 19 nt, Artificial Sequence
  Synthetic Target Sequence/siNA sense region
agagacuuagaggauuuua

SEQ ID NO: 1120 - RNA, 19 nt, Artificial Sequence
  Synthetic Target Sequence/siNA sense region
aagcccagaucacaaaugg

SEQ ID NO: 1121 - RNA, 19 nt, Artificial Sequence
  Synthetic Target Sequence/siNA sense region
gaaacugacuuucucgagc

SEQ ID NO: 1122 - RNA, 19 nt, Artificial Sequence
  Synthetic Target Sequence/siNA sense region
cucgcuauggaugaauuca

SEQ ID NO: 1123 - RNA, 19 nt, Artificial Sequence
  Synthetic Target Sequence/siNA sense region
auacagcgauauaagcucg

SEQ ID NO: 1124 - RNA, 19 nt, Artificial Sequence
  Synthetic Target Sequence/siNA sense region
gagggcuaugccuucgaac

SEQ ID NO: 1125 - RNA, 19 nt, Artificial Sequence
  Synthetic Target Sequence/siNA sense region
cacaucguuuauggagauu

SEQ ID NO: 1126 - RNA, 19 nt, Artificial Sequence
  Synthetic Target Sequence/siNA sense region
uucagucauggacaacuug

SEQ ID NO: 1127 - RNA, 19 nt, Artificial Sequence
  Synthetic Target Sequence/siNA sense region
ggcggucuucauuuaauga

SEQ ID NO: 1128 - RNA, 19 nt, Artificial Sequence
  Synthetic Target Sequence/siNA sense region
auaggcuuagccaagcgcu

SEQ ID NO: 1129 - RNA, 19 nt, Artificial Sequence
  Synthetic Target Sequence/siNA sense region
ucacaagauucaccacuua

SEQ ID NO: 1130 - RNA, 19 nt, Artificial Sequence
  Synthetic Target Sequence/siNA sense region
aaauuagaggauuuuaucc

SEQ ID NO: 1131 - RNA, 19 nt, Artificial Sequence
  Synthetic Target Sequence/siNA sense region
ccuauggacagcacaguga

SEQ ID NO: 1132 - RNA, 19 nt, Artificial Sequence
  Synthetic Target Sequence/siNA sense region
aaaaauuacuucauaacag

SEQ ID NO: 1133 - RNA, 19 nt, Artificial Sequence
  Synthetic Target Sequence/siNA sense region
gaugcgcaaacagguucau

SEQ ID NO: 1134 - RNA, 19 nt, Artificial Sequence
  Synthetic Target Sequence/siNA sense region
ucaaaauguguguguucug

SEQ ID NO: 1135 - RNA, 19 nt, Artificial Sequence
  Synthetic Target Sequence/siNA sense region
gugauugaucuuuuacuug

SEQ ID NO: 1136 - RNA, 19 nt, Artificial Sequence
  Synthetic Target Sequence/siNA sense region
gaugacuuugucgagauaa

SEQ ID NO: 1137 - RNA, 19 nt, Artificial Sequence
  Synthetic Target Sequence/siNA sense region
auaaagucacaagauuugu

SEQ ID NO: 1138 - RNA, 19 nt, Artificial Sequence
  Synthetic Target Sequence/siNA sense region
ucagugauuucaaaagugg

SEQ ID NO: 1139 - RNA, 19 nt, Artificial Sequence
  Synthetic Target Sequence/siNA sense region
gucaagguuacaauugacu

SEQ ID NO: 1140 - RNA, 19 nt, Artificial Sequence
  Synthetic Target Sequence/siNA sense region
uaugcugaaauuucauuca

SEQ ID NO: 1141 - RNA, 19 nt, Artificial Sequence
  Synthetic Target Sequence/siNA sense region
augcuuugguguaaggaug

SEQ ID NO: 1142 - RNA, 19 nt, Artificial Sequence
  Synthetic Target Sequence/siNA sense region
ggacauguugaaaccuucu

SEQ ID NO: 1143 - RNA, 19 nt, Artificial Sequence
  Synthetic Target Sequence/siNA sense region
uacccaaaacuacaagcaa

SEQ ID NO: 1144 - RNA, 19 nt, Artificial Sequence
  Synthetic Target Sequence/siNA sense region
agucgagcguggcaaccag

SEQ ID NO: 1145 - RNA, 19 nt, Artificial Sequence
  Synthetic Target Sequence/siNA sense region
gguguugcgaugccuaacu

SEQ ID NO: 1146 - RNA, 19 nt, Artificial Sequence
  Synthetic Target Sequence/siNA sense region
uuguacaagaugcaaagaa

SEQ ID NO: 1147 - RNA, 19 nt, Artificial Sequence
  Synthetic Target Sequence/siNA sense region
augcuucuugaaaagugug

SEQ ID NO: 1148 - RNA, 19 nt, Artificial Sequence
  Synthetic Target Sequence/siNA sense region
gaccuucagaauuauggug

SEQ ID NO: 1149 - RNA, 19 nt, Artificial Sequence
  Synthetic Target Sequence/siNA sense region
gaaaaugcuguuauaccaa

SEQ ID NO: 1150 - RNA, 19 nt, Artificial Sequence
  Synthetic Target Sequence/siNA sense region
aaaggaauaaugaugaaug

SEQ ID NO: 1151 - RNA, 19 nt, Artificial Sequence
  Synthetic Target Sequence/siNA sense region
gucgcaaaguauacucaac

SEQ ID NO: 1152 - RNA, 19 nt, Artificial Sequence
  Synthetic Target Sequence/siNA sense region
cugugucaauacuuaaaua

SEQ ID NO: 1153 - RNA, 19 nt, Artificial Sequence
  Synthetic Target Sequence/siNA sense region
acacuuacuuuagcuguac

SEQ ID NO: 1154 - RNA, 19 nt, Artificial Sequence
  Synthetic Target Sequence/siNA sense region
cccuacaacaugagaguua

SEQ ID NO: 1155 - RNA, 19 nt, Artificial Sequence
  Synthetic Target Sequence/siNA sense region
auucacuuuggugcuggcu

SEQ ID NO: 1156 - RNA, 19 nt, Artificial Sequence
  Synthetic Target Sequence/siNA sense region
ucugauaaaggaguugcac

SEQ ID NO: 1157 - RNA, 19 nt, Artificial Sequence
  Synthetic Target Sequence/siNA sense region
ccagguacagcugugcuca

SEQ ID NO: 1158 - RNA, 19 nt, Artificial Sequence
  Synthetic Target Sequence/siNA sense region
agacaaugguugccaacug

SEQ ID NO: 1159 - RNA, 19 nt, Artificial Sequence
  Synthetic Target Sequence/siNA sense region
ggcacacuacuugucgauu

SEQ ID NO: 1160 - RNA, 19 nt, Artificial Sequence
  Synthetic Target Sequence/siNA sense region
ucagaucuuaaugacuucg

SEQ ID NO: 1161 - RNA, 19 nt, Artificial Sequence
  Synthetic Target Sequence/siNA sense region
gucuccgacgcauauucua

SEQ ID NO: 1162 - RNA, 19 nt, Artificial Sequence
  Synthetic Target Sequence/siNA sense region
acuuuaauuggagacugug

SEQ ID NO: 1163 - RNA, 19 nt, Artificial Sequence
  Synthetic Target Sequence/siNA sense region
gcaacaguacauacggcua

SEQ ID NO: 1164 - RNA, 19 nt, Artificial Sequence
  Synthetic Target Sequence/siNA sense region
aauaaaugggaccuuauua

SEQ ID NO: 1165 - RNA, 19 nt, Artificial Sequence
  Synthetic Target Sequence/siNA sense region
auuagcgauauguaugacc

SEQ ID NO: 1166 - RNA, 19 nt, Artificial Sequence
  Synthetic Target Sequence/siNA sense region
ccuaggaccaaacauguga

SEQ ID NO: 1167 - RNA, 19 nt, Artificial Sequence
  Synthetic Target Sequence/siNA sense region
acaaaagagaaugacucua

SEQ ID NO: 1168 - RNA, 19 nt, Artificial Sequence
  Synthetic Target Sequence/siNA sense region
aaagaaggguuuuucacuu

SEQ ID NO: 1169 - RNA, 19 nt, Artificial Sequence
  Synthetic Target Sequence/siNA sense region
uaucuguguggauuuauaa

SEQ ID NO: 1170 - RNA, 19 nt, Artificial Sequence
  Synthetic Target Sequence/siNA sense region
aagcaaaaacuagcccugg

SEQ ID NO: 1171 - RNA, 19 nt, Artificial Sequence
  Synthetic Target Sequence/siNA sense region
ggugguucuauagcuguaa

SEQ ID NO: 1172 - RNA, 19 nt, Artificial Sequence
  Synthetic Target Sequence/siNA sense region
aagauaacagagcauucuu

SEQ ID NO: 1173 - RNA, 19 nt, Artificial Sequence
  Synthetic Target Sequence/siNA sense region
uggaaugcugaccuuuaca

SEQ ID NO: 1174 - RNA, 19 nt, Artificial Sequence
  Synthetic Target Sequence/siNA sense region
aagcuuaugggccauuucu

SEQ ID NO: 1175 - RNA, 19 nt, Artificial Sequence
  Synthetic Target Sequence/siNA sense region
ucaugguggacagcuuuug

SEQ ID NO: 1176 - RNA, 19 nt, Artificial Sequence
  Synthetic Target Sequence/siNA sense region
guuacaaauguaaaugcau

SEQ ID NO: 1177 - RNA, 19 nt, Artificial Sequence
  Synthetic Target Sequence/siNA sense region
ucaucaucggaagcauuuu

SEQ ID NO: 1178 - RNA, 19 nt, Artificial Sequence
  Synthetic Target Sequence/siNA sense region
uuaauuggggcuaacuauc

SEQ ID NO: 1179 - RNA, 19 nt, Artificial Sequence
  Synthetic Target Sequence/siNA sense region
cuuggcaagccgaaggaac

SEQ ID NO: 1180 - RNA, 19 nt, Artificial Sequence
  Synthetic Target Sequence/siNA sense region
caaauugauggcuauacca

SEQ ID NO: 1181 - RNA, 19 nt, Artificial Sequence
  Synthetic Target Sequence/siNA sense region
augcaugcuaacuacauuu

SEQ ID NO: 1182 - RNA, 19 nt, Artificial Sequence
  Synthetic Target Sequence/siNA sense region
uucuggaggaacacaaauc

SEQ ID NO: 1183 - RNA, 19 nt, Artificial Sequence
  Synthetic Target Sequence/siNA sense region
ccuauccaguugucuuccu

SEQ ID NO: 1184 - RNA, 19 nt, Artificial Sequence
  Synthetic Target Sequence/siNA sense region
uauucacucuuugacauga

SEQ ID NO: 1185 - RNA, 19 nt, Artificial Sequence
  Synthetic Target Sequence/siNA sense region
agcaaauuuccucuuaaau

SEQ ID NO: 1186 - RNA, 19 nt, Artificial Sequence
  Synthetic Target Sequence/siNA sense region
uuaagaggaacugcuguaa

SEQ ID NO: 1187 - RNA, 19 nt, Artificial Sequence
  Synthetic Target Sequence/siNA sense region
augucucuuaaggagaauc

SEQ ID NO: 1188 - RNA, 19 nt, Artificial Sequence
  Synthetic Target Sequence/siNA sense region
caaaucaaugauaugauuu

SEQ ID NO: 1189 - RNA, 19 nt, Artificial Sequence
  Synthetic Target Sequence/siNA sense region
uauucucuucuggaaaaag

SEQ ID NO: 1190 - RNA, 19 nt, Artificial Sequence
  Synthetic Target Sequence/siNA sense region
gguaggcuuaucauuagag

SEQ ID NO: 1191 - RNA, 19 nt, Artificial Sequence
  Synthetic Target Sequence/siNA sense region
gaaaacaacagaguugugg

SEQ ID NO: 1192 - RNA, 19 nt, Artificial Sequence
  Synthetic Target Sequence/siNA sense region
guuucaagugauauucuug

SEQ ID NO: 1193 - RNA, 19 nt, Artificial Sequence
  Synthetic Target Sequence/siNA sense region
guuaacaacuaaacgaaca

SEQ ID NO: 1194 - RNA, 19 nt, Artificial Sequence
  Synthetic Target Sequence/siNA sense region
auguuuauuuucuuauuau

SEQ ID NO: 1195 - RNA, 19 nt, Artificial Sequence
  Synthetic Target Sequence/siNA sense region
uuucuuacucucacuagug

SEQ ID NO: 1196 - RNA, 19 nt, Artificial Sequence
  Synthetic Target Sequence/siNA sense region
gguagugaccuugaccggu

SEQ ID NO: 1197 - RNA, 19 nt, Artificial Sequence
  Synthetic Target Sequence/siNA sense region
ugcaccacuuuugaugaug

SEQ ID NO: 1198 - RNA, 19 nt, Artificial Sequence
  Synthetic Target Sequence/siNA sense region
guucaagcuccuaauuaca

SEQ ID NO: 1199 - RNA, 19 nt, Artificial Sequence
  Synthetic Target Sequence/siNA sense region
acucaacauacuucaucua

SEQ ID NO: 1200 - RNA, 19 nt, Artificial Sequence
  Synthetic Target Sequence/siNA sense region
augagggggguuuacuauc

SEQ ID NO: 1201 - RNA, 19 nt, Artificial Sequence
  Synthetic Target Sequence/siNA sense region
ccugaugaaauuuuuagau

SEQ ID NO: 1202 - RNA, 19 nt, Artificial Sequence
  Synthetic Target Sequence/siNA sense region
ucagacacucuuuauuuaa

SEQ ID NO: 1203 - RNA, 19 nt, Artificial Sequence
  Synthetic Target Sequence/siNA sense region
acucaggauuuauuucuuc

SEQ ID NO: 1204 - RNA, 19 nt, Artificial Sequence
  Synthetic Target Sequence/siNA sense region
ccauuuuauucuaauguua

SEQ ID NO: 1205 - RNA, 19 nt, Artificial Sequence
  Synthetic Target Sequence/siNA sense region
acaggguuucauacuauua

SEQ ID NO: 1206 - RNA, 19 nt, Artificial Sequence
  Synthetic Target Sequence/siNA sense region
aaucauacguuuggcaacc

SEQ ID NO: 1207 - RNA, 19 nt, Artificial Sequence
  Synthetic Target Sequence/siNA sense region
ccugucauaccuuuuaagg

SEQ ID NO: 1208 - RNA, 19 nt, Artificial Sequence
  Synthetic Target Sequence/siNA sense region
gaugguauuuauuuugcug

SEQ ID NO: 1209 - RNA, 19 nt, Artificial Sequence
  Synthetic Target Sequence/siNA sense region
gccacagagaaaucaaaug

SEQ ID NO: 1210 - RNA, 19 nt, Artificial Sequence
  Synthetic Target Sequence/siNA sense region
guuguccgugguuggguuu

SEQ ID NO: 1211 - RNA, 19 nt, Artificial Sequence
  Synthetic Target Sequence/siNA sense region
uuugguucuaccaugaaca

SEQ ID NO: 1212 - RNA, 19 nt, Artificial Sequence
  Synthetic Target Sequence/siNA sense region
aacaagucacagucgguga

SEQ ID NO: 1213 - RNA, 19 nt, Artificial Sequence
  Synthetic Target Sequence/siNA sense region
auuauuauuaacaauucua

SEQ ID NO: 1214 - RNA, 19 nt, Artificial Sequence
  Synthetic Target Sequence/siNA sense region
acuaauguuguuauacgag

SEQ ID NO: 1215 - RNA, 19 nt, Artificial Sequence
  Synthetic Target Sequence/siNA sense region
gcauguaacuuugaauugu

SEQ ID NO: 1216 - RNA, 19 nt, Artificial Sequence
  Synthetic Target Sequence/siNA sense region
ugugacaacccuuucuuug

SEQ ID NO: 1217 - RNA, 19 nt, Artificial Sequence
  Synthetic Target Sequence/siNA sense region
gcuguuucuaaacccaugg

SEQ ID NO: 1218 - RNA, 19 nt, Artificial Sequence
  Synthetic Target Sequence/siNA sense region
gguacacagacacauacua

SEQ ID NO: 1219 - RNA, 19 nt, Artificial Sequence
  Synthetic Target Sequence/siNA sense region
augauauucgauaaugcau

SEQ ID NO: 1220 - RNA, 19 nt, Artificial Sequence
  Synthetic Target Sequence/siNA sense region
uuuaauugcacuuucgagu

SEQ ID NO: 1221 - RNA, 19 nt, Artificial Sequence
  Synthetic Target Sequence/siNA sense region
uacauaucugaugccuuuu

SEQ ID NO: 1222 - RNA, 19 nt, Artificial Sequence
  Synthetic Target Sequence/siNA sense region
ucgcuugauguuucagaaa

SEQ ID NO: 1223 - RNA, 19 nt, Artificial Sequence
  Synthetic Target Sequence/siNA sense region
aagucagguaauuuuaaac

SEQ ID NO: 1224 - RNA, 19 nt, Artificial Sequence
  Synthetic Target Sequence/siNA sense region
cacuuacgagaguuugugu

SEQ ID NO: 1225 - RNA, 19 nt, Artificial Sequence
  Synthetic Target Sequence/siNA sense region
uuuaaaaauaaagaugggu

SEQ ID NO: 1226 - RNA, 19 nt, Artificial Sequence
  Synthetic Target Sequence/siNA sense region
uuucucuauguuuauaagg

SEQ ID NO: 1227 - RNA, 19 nt, Artificial Sequence
  Synthetic Target Sequence/siNA sense region
ggcuaucaaccuauagaug

SEQ ID NO: 1228 - RNA, 19 nt, Artificial Sequence
  Synthetic Target Sequence/siNA sense region
guaguucgugaucuaccuu

SEQ ID NO: 1229 - RNA, 19 nt, Artificial Sequence
  Synthetic Target Sequence/siNA sense region
ucugguuuuaacacuuuga

SEQ ID NO: 1230 - RNA, 19 nt, Artificial Sequence
  Synthetic Target Sequence/siNA sense region
aaaccuauuuuuaaguugc

SEQ ID NO: 1231 - RNA, 19 nt, Artificial Sequence
  Synthetic Target Sequence/siNA sense region
ccucuugguauuaacauua

SEQ ID NO: 1232 - RNA, 19 nt, Artificial Sequence
  Synthetic Target Sequence/siNA sense region
acaaauuuuagagccauuc

SEQ ID NO: 1233 - RNA, 19 nt, Artificial Sequence
  Synthetic Target Sequence/siNA sense region
cuuacagccuuuucaccug

SEQ ID NO: 1234 - RNA, 19 nt, Artificial Sequence
  Synthetic Target Sequence/siNA sense region
gcucaagacauuuggggca

SEQ ID NO: 1235 - RNA, 19 nt, Artificial Sequence
  Synthetic Target Sequence/siNA sense region
acgucagcugcagccuauu

SEQ ID NO: 1236 - RNA, 19 nt, Artificial Sequence
  Synthetic Target Sequence/siNA sense region
uuuguuggcuauuuaaagc

SEQ ID NO: 1237 - RNA, 19 nt, Artificial Sequence
  Synthetic Target Sequence/siNA sense region
ccaacuacauuuaugcuca

SEQ ID NO: 1238 - RNA, 19 nt, Artificial Sequence
  Synthetic Target Sequence/siNA sense region
aaguaugaugaaaauggua

SEQ ID NO: 1239 - RNA, 19 nt, Artificial Sequence
  Synthetic Target Sequence/siNA sense region
acaaucacagaugcuguug

SEQ ID NO: 1240 - RNA, 19 nt, Artificial Sequence
  Synthetic Target Sequence/siNA sense region
gauuguucucaaaauccac

SEQ ID NO: 1241 - RNA, 19 nt, Artificial Sequence
  Synthetic Target Sequence/siNA sense region
cuugcugaacucaaaugcu

SEQ ID NO: 1242 - RNA, 19 nt, Artificial Sequence
  Synthetic Target Sequence/siNA sense region
ucuguuaagagcuuugaga

SEQ ID NO: 1243 - RNA, 19 nt, Artificial Sequence
  Synthetic Target Sequence/siNA sense region
auugacaaaggaauuuacc

SEQ ID NO: 1244 - RNA, 19 nt, Artificial Sequence
  Synthetic Target Sequence/siNA sense region
cagaccucuaauuucaggg

SEQ ID NO: 1245 - RNA, 19 nt, Artificial Sequence
  Synthetic Target Sequence/siNA sense region
guuguucccucaggagaug

SEQ ID NO: 1246 - RNA, 19 nt, Artificial Sequence
  Synthetic Target Sequence/siNA sense region
guugugagauucccuaaua

SEQ ID NO: 1247 - RNA, 19 nt, Artificial Sequence
  Synthetic Target Sequence/siNA sense region
auuacaaacuuguguccuu

SEQ ID NO: 1248 - RNA, 19 nt, Artificial Sequence
  Synthetic Target Sequence/siNA sense region
uuuggagagguuuuuaaug

SEQ ID NO: 1249 - RNA, 19 nt, Artificial Sequence
  Synthetic Target Sequence/siNA sense region
gcuacuaaauucccuucug

SEQ ID NO: 1250 - RNA, 19 nt, Artificial Sequence
  Synthetic Target Sequence/siNA sense region
gucuaugcaugggagagaa

SEQ ID NO: 1251 - RNA, 19 nt, Artificial Sequence
  Synthetic Target Sequence/siNA sense region
aaaaaaauuucuaauugug

SEQ ID NO: 1252 - RNA, 19 nt, Artificial Sequence
  Synthetic Target Sequence/siNA sense region
guugcugauuacucugugc

SEQ ID NO: 1253 - RNA, 19 nt, Artificial Sequence
  Synthetic Target Sequence/siNA sense region
cucuacaacucaacauuuu

SEQ ID NO: 1254 - RNA, 19 nt, Artificial Sequence
  Synthetic Target Sequence/siNA sense region
uuuucaaccuuuaagugcu

SEQ ID NO: 1255 - RNA, 19 nt, Artificial Sequence
  Synthetic Target Sequence/siNA sense region
uauggcguuucugccacua

SEQ ID NO: 1256 - RNA, 19 nt, Artificial Sequence
  Synthetic Target Sequence/siNA sense region
aaguugaaugaucuuugcu

SEQ ID NO: 1257 - RNA, 19 nt, Artificial Sequence
  Synthetic Target Sequence/siNA sense region
uucuccaaugucuaugcag

SEQ ID NO: 1258 - RNA, 19 nt, Artificial Sequence
  Synthetic Target Sequence/siNA sense region
gauucuuuuguagucaagg

SEQ ID NO: 1259 - RNA, 19 nt, Artificial Sequence
  Synthetic Target Sequence/siNA sense region
ggagaugauguaagacaaa

SEQ ID NO: 1260 - RNA, 19 nt, Artificial Sequence
  Synthetic Target Sequence/siNA sense region
auagcgccaggacaaacug

SEQ ID NO: 1261 - RNA, 19 nt, Artificial Sequence
  Synthetic Target Sequence/siNA sense region
gguguuauugcugauuaua

SEQ ID NO: 1262 - RNA, 19 nt, Artificial Sequence
  Synthetic Target Sequence/siNA sense region
aauuauaaauugccagaug

SEQ ID NO: 1263 - RNA, 19 nt, Artificial Sequence
  Synthetic Target Sequence/siNA sense region
gauuucauggguugugucc

SEQ ID NO: 1264 - RNA, 19 nt, Artificial Sequence
  Synthetic Target Sequence/siNA sense region
cuugcuuggaauacuagga

SEQ ID NO: 1265 - RNA, 19 nt, Artificial Sequence
  Synthetic Target Sequence/siNA sense region
aacauugaugcuacuucaa

SEQ ID NO: 1266 - RNA, 19 nt, Artificial Sequence
  Synthetic Target Sequence/siNA sense region
acugguaauuauaauuaua

SEQ ID NO: 1267 - RNA, 19 nt, Artificial Sequence
  Synthetic Target Sequence/siNA sense region
aaauauagguaucuuagac

SEQ ID NO: 1268 - RNA, 19 nt, Artificial Sequence
  Synthetic Target Sequence/siNA sense region
cauggcaagcuuaggcccu

SEQ ID NO: 1269 - RNA, 19 nt, Artificial Sequence
  Synthetic Target Sequence/siNA sense region
uuugagagagacauaucua

SEQ ID NO: 1270 - RNA, 19 nt, Artificial Sequence
  Synthetic Target Sequence/siNA sense region
aaugugccuuucuccccug

SEQ ID NO: 1271 - RNA, 19 nt, Artificial Sequence
  Synthetic Target Sequence/siNA sense region
gauggcaaaccuugcaccc

SEQ ID NO: 1272 - RNA, 19 nt, Artificial Sequence
  Synthetic Target Sequence/siNA sense region
ccaccugcucuuaauuguu

SEQ ID NO: 1273 - RNA, 19 nt, Artificial Sequence
  Synthetic Target Sequence/siNA sense region
uauuggccauuaaaugauu

SEQ ID NO: 1274 - RNA, 19 nt, Artificial Sequence
  Synthetic Target Sequence/siNA sense region
uaugguuuuuacaccacua

SEQ ID NO: 1275 - RNA, 19 nt, Artificial Sequence
  Synthetic Target Sequence/siNA sense region
acuggcauuggcuaccaac

SEQ ID NO: 1276 - RNA, 19 nt, Artificial Sequence
  Synthetic Target Sequence/siNA sense region
ccuuacagaguuguaguac

SEQ ID NO: 1277 - RNA, 19 nt, Artificial Sequence
  Synthetic Target Sequence/siNA sense region
cuuucuuuugaacuuuuaa

SEQ ID NO: 1278 - RNA, 19 nt, Artificial Sequence
  Synthetic Target Sequence/siNA sense region
aaugcaccggccacgguuu

SEQ ID NO: 1279 - RNA, 19 nt, Artificial Sequence
  Synthetic Target Sequence/siNA sense region
uguggaccaaaauuaucca

SEQ ID NO: 1280 - RNA, 19 nt, Artificial Sequence
  Synthetic Target Sequence/siNA sense region
acugaccuuauuaagaacc

SEQ ID NO: 1281 - RNA, 19 nt, Artificial Sequence
  Synthetic Target Sequence/siNA sense region
cagugugucaauuuuaauu

SEQ ID NO: 1282 - RNA, 19 nt, Artificial Sequence
  Synthetic Target Sequence/siNA sense region
uuuaauggacucacuggua

SEQ ID NO: 1283 - RNA, 19 nt, Artificial Sequence
  Synthetic Target Sequence/siNA sense region
acugguguguuaacuccuu

SEQ ID NO: 1284 - RNA, 19 nt, Artificial Sequence
  Synthetic Target Sequence/siNA sense region
ucuucaaagagauuucaac

SEQ ID NO: 1285 - RNA, 19 nt, Artificial Sequence
  Synthetic Target Sequence/siNA sense region
ccauuucaacaauuuggcc

SEQ ID NO: 1286 - RNA, 19 nt, Artificial Sequence
  Synthetic Target Sequence/siNA sense region
cgugauguuucugauuuca

SEQ ID NO: 1287 - RNA, 19 nt, Artificial Sequence
  Synthetic Target Sequence/siNA sense region
acugauuccguucgagauc

SEQ ID NO: 1288 - RNA, 19 nt, Artificial Sequence
  Synthetic Target Sequence/siNA sense region
ccuaaaacaucugaaauau

SEQ ID NO: 1289 - RNA, 19 nt, Artificial Sequence
  Synthetic Target Sequence/siNA sense region
uuagacauuucaccuugcg

SEQ ID NO: 1290 - RNA, 19 nt, Artificial Sequence
  Synthetic Target Sequence/siNA sense region
gcuuuuggggguguaagug

SEQ ID NO: 1291 - RNA, 19 nt, Artificial Sequence
  Synthetic Target Sequence/siNA sense region
guaauuacaccuggaacaa

SEQ ID NO: 1292 - RNA, 19 nt, Artificial Sequence
  Synthetic Target Sequence/siNA sense region
aaugcuucaucugaaguug

SEQ ID NO: 1293 - RNA, 19 nt, Artificial Sequence
  Synthetic Target Sequence/siNA sense region
gcuguucuauaucaagaug

SEQ ID NO: 1294 - RNA, 19 nt, Artificial Sequence
  Synthetic Target Sequence/siNA sense region
guuaacugcacugauguuu

SEQ ID NO: 1295 - RNA, 19 nt, Artificial Sequence
  Synthetic Target Sequence/siNA sense region
ucuacagcaauucaugcag

SEQ ID NO: 1296 - RNA, 19 nt, Artificial Sequence
  Synthetic Target Sequence/siNA sense region
gaucaacucacaccagcuu

SEQ ID NO: 1297 - RNA, 19 nt, Artificial Sequence
  Synthetic Target Sequence/siNA sense region
uggcgcauauauucuacug

SEQ ID NO: 1298 - RNA, 19 nt, Artificial Sequence
  Synthetic Target Sequence/siNA sense region
ggaaacaauguauuccaga

SEQ ID NO: 1299 - RNA, 19 nt, Artificial Sequence
  Synthetic Target Sequence/siNA sense region
acucaagcaggcugucuua

SEQ ID NO: 1300 - RNA, 19 nt, Artificial Sequence
  Synthetic Target Sequence/siNA sense region
auaggagcugagcaugucg

SEQ ID NO: 1301 - RNA, 19 nt, Artificial Sequence
  Synthetic Target Sequence/siNA sense region
gacacuucuuaugagugcg

SEQ ID NO: 1302 - RNA, 19 nt, Artificial Sequence
  Synthetic Target Sequence/siNA sense region
gacauuccuauuggagcug

SEQ ID NO: 1303 - RNA, 19 nt, Artificial Sequence
  Synthetic Target Sequence/siNA sense region
ggcauuugugcuaguuacc

SEQ ID NO: 1304 - RNA, 19 nt, Artificial Sequence
  Synthetic Target Sequence/siNA sense region
cauacaguuucuuuauuac

SEQ ID NO: 1305 - RNA, 19 nt, Artificial Sequence
  Synthetic Target Sequence/siNA sense region
cguaguacuagccaaaaau

SEQ ID NO: 1306 - RNA, 19 nt, Artificial Sequence
  Synthetic Target Sequence/siNA sense region
ucuauuguggcuuauacua

SEQ ID NO: 1307 - RNA, 19 nt, Artificial Sequence
  Synthetic Target Sequence/siNA sense region
augucuuuaggugcugaua

SEQ ID NO: 1308 - RNA, 19 nt, Artificial Sequence
  Synthetic Target Sequence/siNA sense region
aguucaauugcuuacucua

SEQ ID NO: 1309 - RNA, 19 nt, Artificial Sequence
  Synthetic Target Sequence/siNA sense region
aauaacaccauugcuauac

SEQ ID NO: 1310 - RNA, 19 nt, Artificial Sequence
  Synthetic Target Sequence/siNA sense region
ccuacuaacuuuucaauua

SEQ ID NO: 1311 - RNA, 19 nt, Artificial Sequence
  Synthetic Target Sequence/siNA sense region
agcauuacuacagaaguaa

SEQ ID NO: 1312 - RNA, 19 nt, Artificial Sequence
  Synthetic Target Sequence/siNA sense region
augccuguuucuauggcua

SEQ ID NO: 1313 - RNA, 19 nt, Artificial Sequence
  Synthetic Target Sequence/siNA sense region
aaaaccuccguagauugua

SEQ ID NO: 1314 - RNA, 19 nt, Artificial Sequence
  Synthetic Target Sequence/siNA sense region
aauauguacaucugcggag

SEQ ID NO: 1315 - RNA, 19 nt, Artificial Sequence
  Synthetic Target Sequence/siNA sense region
gauucuacugaaugugcua

SEQ ID NO: 1316 - RNA, 19 nt, Artificial Sequence
  Synthetic Target Sequence/siNA sense region
aauuugcuucuccaauaug

SEQ ID NO: 1317 - RNA, 19 nt, Artificial Sequence
  Synthetic Target Sequence/siNA sense region
gguagcuuuugcacacaac

SEQ ID NO: 1318 - RNA, 19 nt, Artificial Sequence
  Synthetic Target Sequence/siNA sense region
cuaaaucgugcacucucag

SEQ ID NO: 1319 - RNA, 19 nt, Artificial Sequence
  Synthetic Target Sequence/siNA sense region
gguauugcugcugaacagg

SEQ ID NO: 1320 - RNA, 19 nt, Artificial Sequence
  Synthetic Target Sequence/siNA sense region
gaucgcaacacacgugaag

SEQ ID NO: 1321 - RNA, 19 nt, Artificial Sequence
  Synthetic Target Sequence/siNA sense region
guguucgcucaagucaaac

SEQ ID NO: 1322 - RNA, 19 nt, Artificial Sequence
  Synthetic Target Sequence/siNA sense region
caaauguacaaaaccccaa

SEQ ID NO: 1323 - RNA, 19 nt, Artificial Sequence
  Synthetic Target Sequence/siNA sense region
acuuugaaauauuuuggug

SEQ ID NO: 1324 - RNA, 19 nt, Artificial Sequence
  Synthetic Target Sequence/siNA sense region
gguuuuaauuuuucacaaa

SEQ ID NO: 1325 - RNA, 19 nt, Artificial Sequence
  Synthetic Target Sequence/siNA sense region
auauuaccugacccucuaa

SEQ ID NO: 1326 - RNA, 19 nt, Artificial Sequence
  Synthetic Target Sequence/siNA sense region
aagccaacuaagaggucuu

SEQ ID NO: 1327 - RNA, 19 nt, Artificial Sequence
  Synthetic Target Sequence/siNA sense region
uuuauugaggacuugcucu

SEQ ID NO: 1328 - RNA, 19 nt, Artificial Sequence
  Synthetic Target Sequence/siNA sense region
uuuaauaaggugacacucg

SEQ ID NO: 1329 - RNA, 19 nt, Artificial Sequence
  Synthetic Target Sequence/siNA sense region
gcugaugcuggcuucauga

SEQ ID NO: 1330 - RNA, 19 nt, Artificial Sequence
  Synthetic Target Sequence/siNA sense region
aagcaauauggcgaaugcc

SEQ ID NO: 1331 - RNA, 19 nt, Artificial Sequence
  Synthetic Target Sequence/siNA sense region
cuaggugauauuaaugcua

SEQ ID NO: 1332 - RNA, 19 nt, Artificial Sequence
  Synthetic Target Sequence/siNA sense region
agagaucucauuugugcgc

SEQ ID NO: 1333 - RNA, 19 nt, Artificial Sequence
  Synthetic Target Sequence/siNA sense region
cagaaguucaauggacuua

SEQ ID NO: 1334 - RNA, 19 nt, Artificial Sequence
  Synthetic Target Sequence/siNA sense region
acaguguugccaccucugc

SEQ ID NO: 1335 - RNA, 19 nt, Artificial Sequence
  Synthetic Target Sequence/siNA sense region
cucacugaugauaugauug

SEQ ID NO: 1336 - RNA, 19 nt, Artificial Sequence
  Synthetic Target Sequence/siNA sense region
gcugccuacacugcugcuc

SEQ ID NO: 1337 - RNA, 19 nt, Artificial Sequence
  Synthetic Target Sequence/siNA sense region
cuaguuagugguacugcca

SEQ ID NO: 1338 - RNA, 19 nt, Artificial Sequence
  Synthetic Target Sequence/siNA sense region
acugcuggauggacauuug

SEQ ID NO: 1339 - RNA, 19 nt, Artificial Sequence
  Synthetic Target Sequence/siNA sense region
ggugcuggcgcugcucuuc

SEQ ID NO: 1340 - RNA, 19 nt, Artificial Sequence
  Synthetic Target Sequence/siNA sense region
caaauaccuuuugcuaugc

SEQ ID NO: 1341 - RNA, 19 nt, Artificial Sequence
  Synthetic Target Sequence/siNA sense region
caaauggcauauagguuca

SEQ ID NO: 1342 - RNA, 19 nt, Artificial Sequence
  Synthetic Target Sequence/siNA sense region
aauggcauuggaguuaccc

SEQ ID NO: 1343 - RNA, 19 nt, Artificial Sequence
  Synthetic Target Sequence/siNA sense region
caaaauguucucuaugaga

SEQ ID NO: 1344 - RNA, 19 nt, Artificial Sequence
  Synthetic Target Sequence/siNA sense region
aaccaaaaacaaaucgcca

SEQ ID NO: 1345 - RNA, 19 nt, Artificial Sequence
  Synthetic Target Sequence/siNA sense region
aaccaauuuaacaaggcga

SEQ ID NO: 1346 - RNA, 19 nt, Artificial Sequence
  Synthetic Target Sequence/siNA sense region
auuagucaaauucaagaau

SEQ ID NO: 1347 - RNA, 19 nt, Artificial Sequence
  Synthetic Target Sequence/siNA sense region
ucacuuacaacaacaucaa

SEQ ID NO: 1348 - RNA, 19 nt, Artificial Sequence
  Synthetic Target Sequence/siNA sense region
acugcauugggcaagcugc

SEQ ID NO: 1349 - RNA, 19 nt, Artificial Sequence
  Synthetic Target Sequence/siNA sense region
caagacguuguuaaccaga

SEQ ID NO: 1350 - RNA, 19 nt, Artificial Sequence
  Synthetic Target Sequence/siNA sense region
aaugcucaagcauuaaaca

SEQ ID NO: 1351 - RNA, 19 nt, Artificial Sequence
  Synthetic Target Sequence/siNA sense region
acacuuguuaaacaacuua

SEQ ID NO: 1352 - RNA, 19 nt, Artificial Sequence
  Synthetic Target Sequence/siNA sense region
agcucuaauuuuggugcaa

SEQ ID NO: 1353 - RNA, 19 nt, Artificial Sequence
  Synthetic Target Sequence/siNA sense region
auuucaagugugcuaaaug

SEQ ID NO: 1354 - RNA, 19 nt, Artificial Sequence
  Synthetic Target Sequence/siNA sense region
gauauccuuucgcgacuug

SEQ ID NO: 1355 - RNA, 19 nt, Artificial Sequence
  Synthetic Target Sequence/siNA sense region
gauaaagucgaggcggagg

SEQ ID NO: 1356 - RNA, 19 nt, Artificial Sequence
  Synthetic Target Sequence/siNA sense region
guacaaauugacagguuaa

SEQ ID NO: 1357 - RNA, 19 nt, Artificial Sequence
  Synthetic Target Sequence/siNA sense region
auuacaggcagacuucaaa

SEQ ID NO: 1358 - RNA, 19 nt, Artificial Sequence
  Synthetic Target Sequence/siNA sense region
agccuucaaaccuauguaa

SEQ ID NO: 1359 - RNA, 19 nt, Artificial Sequence
  Synthetic Target Sequence/siNA sense region
acacaacaacuaaucaggg

SEQ ID NO: 1360 - RNA, 19 nt, Artificial Sequence
  Synthetic Target Sequence/siNA sense region
gcugcugaaaucagggcuu

SEQ ID NO: 1361 - RNA, 19 nt, Artificial Sequence
  Synthetic Target Sequence/siNA sense region
ucugcuaaucuugcugcua

SEQ ID NO: 1362 - RNA, 19 nt, Artificial Sequence
  Synthetic Target Sequence/siNA sense region
acuaaaaugucugagugug

SEQ ID NO: 1363 - RNA, 19 nt, Artificial Sequence
  Synthetic Target Sequence/siNA sense region
guucuuggacaaucaaaaa

SEQ ID NO: 1364 - RNA, 19 nt, Artificial Sequence
  Synthetic Target Sequence/siNA sense region
agaguugacuuuuguggaa

SEQ ID NO: 1365 - RNA, 19 nt, Artificial Sequence
  Synthetic Target Sequence/siNA sense region
aagggcuaccaccuuaugu

SEQ ID NO: 1366 - RNA, 19 nt, Artificial Sequence
  Synthetic Target Sequence/siNA sense region
uccuucccacaagcagccc

SEQ ID NO: 1367 - RNA, 19 nt, Artificial Sequence
  Synthetic Target Sequence/siNA sense region
ccgcaugguguugucuucc

SEQ ID NO: 1368 - RNA, 19 nt, Artificial Sequence
  Synthetic Target Sequence/siNA sense region
cuacaugucacguaugugc

SEQ ID NO: 1369 - RNA, 19 nt, Artificial Sequence
  Synthetic Target Sequence/siNA sense region
ccaucccaggagaggaacu

SEQ ID NO: 1370 - RNA, 19 nt, Artificial Sequence
  Synthetic Target Sequence/siNA sense region
uucaccacagcgccagcaa

SEQ ID NO: 1371 - RNA, 19 nt, Artificial Sequence
  Synthetic Target Sequence/siNA sense region
auuugucaugaaggcaaag

SEQ ID NO: 1372 - RNA, 19 nt, Artificial Sequence
  Synthetic Target Sequence/siNA sense region
gcauacuucccucgugaag

SEQ ID NO: 1373 - RNA, 19 nt, Artificial Sequence
  Synthetic Target Sequence/siNA sense region
gguguuuuuguguuuaaug

SEQ ID NO: 1374 - RNA, 19 nt, Artificial Sequence
  Synthetic Target Sequence/siNA sense region
ggcacuucuugguuuauua

SEQ ID NO: 1375 - RNA, 19 nt, Artificial Sequence
  Synthetic Target Sequence/siNA sense region
acacagaggaacuucuuuu

SEQ ID NO: 1376 - RNA, 19 nt, Artificial Sequence
  Synthetic Target Sequence/siNA sense region
ucuccacaaauaauuacua

SEQ ID NO: 1377 - RNA, 19 nt, Artificial Sequence
  Synthetic Target Sequence/siNA sense region
acagacaauacauuugucu

SEQ ID NO: 1378 - RNA, 19 nt, Artificial Sequence
  Synthetic Target Sequence/siNA sense region
ucaggaaauugugaugucg

SEQ ID NO: 1379 - RNA, 19 nt, Artificial Sequence
  Synthetic Target Sequence/siNA sense region
guuauuggcaucauuaaca

SEQ ID NO: 1380 - RNA, 19 nt, Artificial Sequence
  Synthetic Target Sequence/siNA sense region
aacacaguuuaugauccuc

SEQ ID NO: 1381 - RNA, 19 nt, Artificial Sequence
  Synthetic Target Sequence/siNA sense region
cugcaaccugagcuugacu

SEQ ID NO: 1382 - RNA, 19 nt, Artificial Sequence
  Synthetic Target Sequence/siNA sense region
ucauucaaagaagagcugg

SEQ ID NO: 1383 - RNA, 19 nt, Artificial Sequence
  Synthetic Target Sequence/siNA sense region
gacaaguacuucaaaaauc

SEQ ID NO: 1384 - RNA, 19 nt, Artificial Sequence
  Synthetic Target Sequence/siNA sense region
cauacaucaccagauguug

SEQ ID NO: 1385 - RNA, 19 nt, Artificial Sequence
  Synthetic Target Sequence/siNA sense region
gaucuuggcgacauuucag

SEQ ID NO: 1386 - RNA, 19 nt, Artificial Sequence
  Synthetic Target Sequence/siNA sense region
ggcauuaacgcuucugucg

SEQ ID NO: 1387 - RNA, 19 nt, Artificial Sequence
  Synthetic Target Sequence/siNA sense region
gucaacauucaaaaagaaa

SEQ ID NO: 1388 - RNA, 19 nt, Artificial Sequence
  Synthetic Target Sequence/siNA sense region
auugaccgccucaaugagg

SEQ ID NO: 1389 - RNA, 19 nt, Artificial Sequence
  Synthetic Target Sequence/siNA sense region
gucgcuaaaaauuuaaaug

SEQ ID NO: 1390 - RNA, 19 nt, Artificial Sequence
  Synthetic Target Sequence/siNA sense region
gaaucacucauugaccuuc

SEQ ID NO: 1391 - RNA, 19 nt, Artificial Sequence
  Synthetic Target Sequence/siNA sense region
caagaauugggaaaauaug

SEQ ID NO: 1392 - RNA, 19 nt, Artificial Sequence
  Synthetic Target Sequence/siNA sense region
gagcaauauauuaaauggc

SEQ ID NO: 1393 - RNA, 19 nt, Artificial Sequence
  Synthetic Target Sequence/siNA sense region
ccuugguauguuuggcucg

SEQ ID NO: 1394 - RNA, 19 nt, Artificial Sequence
  Synthetic Target Sequence/siNA sense region
ggcuucauugcuggacuaa

SEQ ID NO: 1395 - RNA, 19 nt, Artificial Sequence
  Synthetic Target Sequence/siNA sense region
auugccaucgucaugguua

SEQ ID NO: 1396 - RNA, 19 nt, Artificial Sequence
  Synthetic Target Sequence/siNA sense region
acaaucuugcuuuguugca

SEQ ID NO: 1397 - RNA, 19 nt, Artificial Sequence
  Synthetic Target Sequence/siNA sense region
augacuaguuguugcaguu

SEQ ID NO: 1398 - RNA, 19 nt, Artificial Sequence
  Synthetic Target Sequence/siNA sense region
ugccucaagggugcaugcu

SEQ ID NO: 1399 - RNA, 19 nt, Artificial Sequence
  Synthetic Target Sequence/siNA sense region
ucuugugguucuugcugca

SEQ ID NO: 1400 - RNA, 19 nt, Artificial Sequence
  Synthetic Target Sequence/siNA sense region
aaguuugaugaggaugacu

SEQ ID NO: 1401 - RNA, 19 nt, Artificial Sequence
  Synthetic Target Sequence/siNA sense region
ucugagccaguucucaagg

SEQ ID NO: 1402 - RNA, 19 nt, Artificial Sequence
  Synthetic Target Sequence/siNA sense region
ggugucaaauuacauuaca

SEQ ID NO: 1403 - RNA, 19 nt, Artificial Sequence
  Synthetic Target Sequence/siNA sense region
acauaaacgaacuuaugga

SEQ ID NO: 1404 - RNA, 19 nt, Artificial Sequence
  Synthetic Target Sequence/siNA sense region
auuuguuuaugagauuuuu

SEQ ID NO: 1405 - RNA, 19 nt, Artificial Sequence
  Synthetic Target Sequence/siNA sense region
uuacucuuggaucaauuac

SEQ ID NO: 1406 - RNA, 19 nt, Artificial Sequence
  Synthetic Target Sequence/siNA sense region
cugcacagccaguaaaaau

SEQ ID NO: 1407 - RNA, 19 nt, Artificial Sequence
  Synthetic Target Sequence/siNA sense region
uugacaaugcuucuccugc

SEQ ID NO: 1408 - RNA, 19 nt, Artificial Sequence
  Synthetic Target Sequence/siNA sense region
caaguacuguucaugcuac

SEQ ID NO: 1409 - RNA, 19 nt, Artificial Sequence
  Synthetic Target Sequence/siNA sense region
cagcaacgauaccgcuaca

SEQ ID NO: 1410 - RNA, 19 nt, Artificial Sequence
  Synthetic Target Sequence/siNA sense region
aagccucacucccuuucgg

SEQ ID NO: 1411 - RNA, 19 nt, Artificial Sequence
  Synthetic Target Sequence/siNA sense region
gauggcuuguuauuggcgu

SEQ ID NO: 1412 - RNA, 19 nt, Artificial Sequence
  Synthetic Target Sequence/siNA sense region
uugcauuucuugcuguuuu

SEQ ID NO: 1413 - RNA, 19 nt, Artificial Sequence
  Synthetic Target Sequence/siNA sense region
uucagagcgcuaccaaaau

SEQ ID NO: 1414 - RNA, 19 nt, Artificial Sequence
  Synthetic Target Sequence/siNA sense region
uaauugcgcucaauaaaag

SEQ ID NO: 1415 - RNA, 19 nt, Artificial Sequence
  Synthetic Target Sequence/siNA sense region
gauggcagcuagcccuuua

SEQ ID NO: 1416 - RNA, 19 nt, Artificial Sequence
  Synthetic Target Sequence/siNA sense region
auaagggcuuccaguucau

SEQ ID NO: 1417 - RNA, 19 nt, Artificial Sequence
  Synthetic Target Sequence/siNA sense region
uuugcaauuuacugcugcu

SEQ ID NO: 1418 - RNA, 19 nt, Artificial Sequence
  Synthetic Target Sequence/siNA sense region
uauuuguuaccaucuauuc

SEQ ID NO: 1419 - RNA, 19 nt, Artificial Sequence
  Synthetic Target Sequence/siNA sense region
cacaucuuuugcuugucgc

SEQ ID NO: 1420 - RNA, 19 nt, Artificial Sequence
  Synthetic Target Sequence/siNA sense region
cugcagguauggaggcgca

SEQ ID NO: 1421 - RNA, 19 nt, Artificial Sequence
  Synthetic Target Sequence/siNA sense region
aauuuuuguaccucuaugc

SEQ ID NO: 1422 - RNA, 19 nt, Artificial Sequence
  Synthetic Target Sequence/siNA sense region
ccuugauauauuuucuaca

SEQ ID NO: 1423 - RNA, 19 nt, Artificial Sequence
  Synthetic Target Sequence/siNA sense region
aaugcaucaacgcauguag

SEQ ID NO: 1424 - RNA, 19 nt, Artificial Sequence
  Synthetic Target Sequence/siNA sense region
gaauuauuaugagauguug

SEQ ID NO: 1425 - RNA, 19 nt, Artificial Sequence
  Synthetic Target Sequence/siNA sense region
ggcuuuguuggaagugcaa

SEQ ID NO: 1426 - RNA, 19 nt, Artificial Sequence
  Synthetic Target Sequence/siNA sense region
aauccaagaacccauuacu

SEQ ID NO: 1427 - RNA, 19 nt, Artificial Sequence
  Synthetic Target Sequence/siNA sense region
uuuaugaugccaacuacuu

SEQ ID NO: 1428 - RNA, 19 nt, Artificial Sequence
  Synthetic Target Sequence/siNA sense region
uuguuugcuggcacacaca

SEQ ID NO: 1429 - RNA, 19 nt, Artificial Sequence
  Synthetic Target Sequence/siNA sense region
auaacuaugacuacuguau

SEQ ID NO: 1430 - RNA, 19 nt, Artificial Sequence
  Synthetic Target Sequence/siNA sense region
uaccauauaacagugucac

SEQ ID NO: 1431 - RNA, 19 nt, Artificial Sequence
  Synthetic Target Sequence/siNA sense region
cagauacaauugucguuac

SEQ ID NO: 1432 - RNA, 19 nt, Artificial Sequence
  Synthetic Target Sequence/siNA sense region
cugaaggugacggcauuuc

SEQ ID NO: 1433 - RNA, 19 nt, Artificial Sequence
  Synthetic Target Sequence/siNA sense region
caacaccaaaacucaaaga

SEQ ID NO: 1434 - RNA, 19 nt, Artificial Sequence
  Synthetic Target Sequence/siNA sense region
aagacuaccaaauuggugg

SEQ ID NO: 1435 - RNA, 19 nt, Artificial Sequence
  Synthetic Target Sequence/siNA sense region
guuauucugaggauaggca

SEQ ID NO: 1436 - RNA, 19 nt, Artificial Sequence
  Synthetic Target Sequence/siNA sense region
acucagguguuaaagacua

SEQ ID NO: 1437 - RNA, 19 nt, Artificial Sequence
  Synthetic Target Sequence/siNA sense region
augucguuguacauggcua

SEQ ID NO: 1438 - RNA, 19 nt, Artificial Sequence
  Synthetic Target Sequence/siNA sense region
auuucaccgaaguuuacua

SEQ ID NO: 1439 - RNA, 19 nt, Artificial Sequence
  Synthetic Target Sequence/siNA sense region
accagcuugagucuacaca

SEQ ID NO: 1440 - RNA, 19 nt, Artificial Sequence
  Synthetic Target Sequence/siNA sense region
aaauuacuacagacacugg

SEQ ID NO: 1441 - RNA, 19 nt, Artificial Sequence
  Synthetic Target Sequence/siNA sense region
guauugaaaaugcuacauu

SEQ ID NO: 1442 - RNA, 19 nt, Artificial Sequence
  Synthetic Target Sequence/siNA sense region
ucuucaucuuuaacaagcu

SEQ ID NO: 1443 - RNA, 19 nt, Artificial Sequence
  Synthetic Target Sequence/siNA sense region
uuguuaaagacccaccgaa

SEQ ID NO: 1444 - RNA, 19 nt, Artificial Sequence
  Synthetic Target Sequence/siNA sense region
augugcaaauacacacaau

SEQ ID NO: 1445 - RNA, 19 nt, Artificial Sequence
  Synthetic Target Sequence/siNA sense region
ucgacggcucuucaggagu

SEQ ID NO: 1446 - RNA, 19 nt, Artificial Sequence
  Synthetic Target Sequence/siNA sense region
uugcuaauccagcaaugga

SEQ ID NO: 1447 - RNA, 19 nt, Artificial Sequence
  Synthetic Target Sequence/siNA sense region
auccaauuuaugaugagcc

SEQ ID NO: 1448 - RNA, 19 nt, Artificial Sequence
  Synthetic Target Sequence/siNA sense region
cgacgacgacuacuagcgu

SEQ ID NO: 1449 - RNA, 19 nt, Artificial Sequence
  Synthetic Target Sequence/siNA sense region
ugccuuuguaagcacaaga

SEQ ID NO: 1450 - RNA, 19 nt, Artificial Sequence
  Synthetic Target Sequence/siNA sense region
aaagugaguacgaacuuau

SEQ ID NO: 1451 - RNA, 19 nt, Artificial Sequence
  Synthetic Target Sequence/siNA sense region
uguacucauucguuucgga

SEQ ID NO: 1452 - RNA, 19 nt, Artificial Sequence
  Synthetic Target Sequence/siNA sense region
aagaaacagguacguuaau

SEQ ID NO: 1453 - RNA, 19 nt, Artificial Sequence
  Synthetic Target Sequence/siNA sense region
uaguuaauagcguacuucu

SEQ ID NO: 1454 - RNA, 19 nt, Artificial Sequence
  Synthetic Target Sequence/siNA sense region
uuuuucuugcuuucguggu

SEQ ID NO: 1455 - RNA, 19 nt, Artificial Sequence
  Synthetic Target Sequence/siNA sense region
uauucuugcuagucacacu

SEQ ID NO: 1456 - RNA, 19 nt, Artificial Sequence
  Synthetic Target Sequence/siNA sense region
uagccauccuuacugcgcu

SEQ ID NO: 1457 - RNA, 19 nt, Artificial Sequence
  Synthetic Target Sequence/siNA sense region
uucgauugugugcguacug

SEQ ID NO: 1458 - RNA, 19 nt, Artificial Sequence
  Synthetic Target Sequence/siNA sense region
gcugcaauauuguuaacgu

SEQ ID NO: 1459 - RNA, 19 nt, Artificial Sequence
  Synthetic Target Sequence/siNA sense region
ugaguuuaguaaaaccaac

SEQ ID NO: 1460 - RNA, 19 nt, Artificial Sequence
  Synthetic Target Sequence/siNA sense region
cgguuuacgucuacucgcg

SEQ ID NO: 1461 - RNA, 19 nt, Artificial Sequence
  Synthetic Target Sequence/siNA sense region
guguuaaaaaucugaacuc

SEQ ID NO: 1462 - RNA, 19 nt, Artificial Sequence
  Synthetic Target Sequence/siNA sense region
cuucugaaggaguuccuga

SEQ ID NO: 1463 - RNA, 19 nt, Artificial Sequence
  Synthetic Target Sequence/siNA sense region
aucuucuggucuaaacgaa

SEQ ID NO: 1464 - RNA, 19 nt, Artificial Sequence
  Synthetic Target Sequence/siNA sense region
acuaacuauuauuauuauu

SEQ ID NO: 1465 - RNA, 19 nt, Artificial Sequence
  Synthetic Target Sequence/siNA sense region
ucuguuuggaacuuuaaca

SEQ ID NO: 1466 - RNA, 19 nt, Artificial Sequence
  Synthetic Target Sequence/siNA sense region
auugcuuaucauggcagac

SEQ ID NO: 1467 - RNA, 19 nt, Artificial Sequence
  Synthetic Target Sequence/siNA sense region
caacgguacuauuaccguu

SEQ ID NO: 1468 - RNA, 19 nt, Artificial Sequence
  Synthetic Target Sequence/siNA sense region
ugaggagcuuaaacaacuc

SEQ ID NO: 1469 - RNA, 19 nt, Artificial Sequence
  Synthetic Target Sequence/siNA sense region
ccuggaacaauggaaccua

SEQ ID NO: 1470 - RNA, 19 nt, Artificial Sequence
  Synthetic Target Sequence/siNA sense region
aguaauagguuuccuauuc

SEQ ID NO: 1471 - RNA, 19 nt, Artificial Sequence
  Synthetic Target Sequence/siNA sense region
ccuagccuggauuauguua

SEQ ID NO: 1472 - RNA, 19 nt, Artificial Sequence
  Synthetic Target Sequence/siNA sense region
acuacaauuugccuauucu

SEQ ID NO: 1473 - RNA, 19 nt, Artificial Sequence
  Synthetic Target Sequence/siNA sense region
uaaucggaacagguuuuug

SEQ ID NO: 1474 - RNA, 19 nt, Artificial Sequence
  Synthetic Target Sequence/siNA sense region
guacauaauaaagcuuguu

SEQ ID NO: 1475 - RNA, 19 nt, Artificial Sequence
  Synthetic Target Sequence/siNA sense region
uuuccucuggcucuugugg

SEQ ID NO: 1476 - RNA, 19 nt, Artificial Sequence
  Synthetic Target Sequence/siNA sense region
gccaguaacacuugcuugu

SEQ ID NO: 1477 - RNA, 19 nt, Artificial Sequence
  Synthetic Target Sequence/siNA sense region
uuuugugcuugcugcuguc

SEQ ID NO: 1478 - RNA, 19 nt, Artificial Sequence
  Synthetic Target Sequence/siNA sense region
cuacagaauuaauugggug

SEQ ID NO: 1479 - RNA, 19 nt, Artificial Sequence
  Synthetic Target Sequence/siNA sense region
gacuggcgggauugcgauu

SEQ ID NO: 1480 - RNA, 19 nt, Artificial Sequence
  Synthetic Target Sequence/siNA sense region
ugcaauggcuuguauugua

SEQ ID NO: 1481 - RNA, 19 nt, Artificial Sequence
  Synthetic Target Sequence/siNA sense region
aggcuugauguggcuuagc

SEQ ID NO: 1482 - RNA, 19 nt, Artificial Sequence
  Synthetic Target Sequence/siNA sense region
cuacuucguugcuuccuuc

SEQ ID NO: 1483 - RNA, 19 nt, Artificial Sequence
  Synthetic Target Sequence/siNA sense region
caggcuguuugcucguacc

SEQ ID NO: 1484 - RNA, 19 nt, Artificial Sequence
  Synthetic Target Sequence/siNA sense region
ccgcucaauguggucauuc

SEQ ID NO: 1485 - RNA, 19 nt, Artificial Sequence
  Synthetic Target Sequence/siNA sense region
caacccagaaacaaacauu

SEQ ID NO: 1486 - RNA, 19 nt, Artificial Sequence
  Synthetic Target Sequence/siNA sense region
ucuucucaaugugccucuc

SEQ ID NO: 1487 - RNA, 19 nt, Artificial Sequence
  Synthetic Target Sequence/siNA sense region
ccgggggacaauugugacc

SEQ ID NO: 1488 - RNA, 19 nt, Artificial Sequence
  Synthetic Target Sequence/siNA sense region
cagaccgcucauggaaagu

SEQ ID NO: 1489 - RNA, 19 nt, Artificial Sequence
  Synthetic Target Sequence/siNA sense region
ugaacuugucauuggugcu

SEQ ID NO: 1490 - RNA, 19 nt, Artificial Sequence
  Synthetic Target Sequence/siNA sense region
ugugaucauucguggucac

SEQ ID NO: 1491 - RNA, 19 nt, Artificial Sequence
  Synthetic Target Sequence/siNA sense region
cuugcgaauggccggacac

SEQ ID NO: 1492 - RNA, 19 nt, Artificial Sequence
  Synthetic Target Sequence/siNA sense region
cucccuagggcgcugugac

SEQ ID NO: 1493 - RNA, 19 nt, Artificial Sequence
  Synthetic Target Sequence/siNA sense region
cauuaaggaccugccaaaa

SEQ ID NO: 1494 - RNA, 19 nt, Artificial Sequence
  Synthetic Target Sequence/siNA sense region
agagaucacuguggcuaca

SEQ ID NO: 1495 - RNA, 19 nt, Artificial Sequence
  Synthetic Target Sequence/siNA sense region
aucacgaacgcuuucuuau

SEQ ID NO: 1496 - RNA, 19 nt, Artificial Sequence
  Synthetic Target Sequence/siNA sense region
uuacaaauuaggagcgucg

SEQ ID NO: 1497 - RNA, 19 nt, Artificial Sequence
  Synthetic Target Sequence/siNA sense region
gcagcguguaggcacugau

SEQ ID NO: 1498 - RNA, 19 nt, Artificial Sequence
  Synthetic Target Sequence/siNA sense region
uucagguuuugcugcauac

SEQ ID NO: 1499 - RNA, 19 nt, Artificial Sequence
  Synthetic Target Sequence/siNA sense region
caaccgcuaccguauugga

SEQ ID NO: 1500 - RNA, 19 nt, Artificial Sequence
  Synthetic Target Sequence/siNA sense region
aaacuauaaauuaaauaca

SEQ ID NO: 1501 - RNA, 19 nt, Artificial Sequence
  Synthetic Target Sequence/siNA sense region
agaccacgccgguagcaac

SEQ ID NO: 1502 - RNA, 19 nt, Artificial Sequence
  Synthetic Target Sequence/siNA sense region
cgacaauauugcuuugcua

SEQ ID NO: 1503 - RNA, 19 nt, Artificial Sequence
  Synthetic Target Sequence/siNA sense region
aguacaguaagugacaaca

SEQ ID NO: 1504 - RNA, 19 nt, Artificial Sequence
  Synthetic Target Sequence/siNA sense region
agauguuucaucuuguuga

SEQ ID NO: 1505 - RNA, 19 nt, Artificial Sequence
  Synthetic Target Sequence/siNA sense region
acuuccagguuacaauagc

SEQ ID NO: 1506 - RNA, 19 nt, Artificial Sequence
  Synthetic Target Sequence/siNA sense region
cagagauauugauuaucau

SEQ ID NO: 1507 - RNA, 19 nt, Artificial Sequence
  Synthetic Target Sequence/siNA sense region
uuaugaggacuuucaggau

SEQ ID NO: 1508 - RNA, 19 nt, Artificial Sequence
  Synthetic Target Sequence/siNA sense region
uugcuauuuggaaucuuga

SEQ ID NO: 1509 - RNA, 19 nt, Artificial Sequence
  Synthetic Target Sequence/siNA sense region
acguuauaauaaguucaau

SEQ ID NO: 1510 - RNA, 19 nt, Artificial Sequence
  Synthetic Target Sequence/siNA sense region
uagugagacaauuauuuaa

SEQ ID NO: 1511 - RNA, 19 nt, Artificial Sequence
  Synthetic Target Sequence/siNA sense region
agccucuaacuaagaagaa

SEQ ID NO: 1512 - RNA, 19 nt, Artificial Sequence
  Synthetic Target Sequence/siNA sense region
auuauucggaguuagauga

SEQ ID NO: 1513 - RNA, 19 nt, Artificial Sequence
  Synthetic Target Sequence/siNA sense region
augaagaaccuauggaguu

SEQ ID NO: 1514 - RNA, 19 nt, Artificial Sequence
  Synthetic Target Sequence/siNA sense region
uagauuauccauaaaacga

SEQ ID NO: 1515 - RNA, 19 nt, Artificial Sequence
  Synthetic Target Sequence/siNA sense region
aacaugaaaauuauucucu

SEQ ID NO: 1516 - RNA, 19 nt, Artificial Sequence
  Synthetic Target Sequence/siNA sense region
uuccugacauugauuguau

SEQ ID NO: 1517 - RNA, 19 nt, Artificial Sequence
  Synthetic Target Sequence/siNA sense region
uuuacaucuugcgagcuau

SEQ ID NO: 1518 - RNA, 19 nt, Artificial Sequence
  Synthetic Target Sequence/siNA sense region
uaucacuaucaggagugug

SEQ ID NO: 1519 - RNA, 19 nt, Artificial Sequence
  Synthetic Target Sequence/siNA sense region
guuagagguacgacuguac

SEQ ID NO: 1520 - RNA, 19 nt, Artificial Sequence
  Synthetic Target Sequence/siNA sense region
cuacuaaaagaaccuugcc

SEQ ID NO: 1521 - RNA, 19 nt, Artificial Sequence
  Synthetic Target Sequence/siNA sense region
ccaucaggaacauacgagg

SEQ ID NO: 1522 - RNA, 19 nt, Artificial Sequence
  Synthetic Target Sequence/siNA sense region
ggcaauucaccauuucacc

SEQ ID NO: 1523 - RNA, 19 nt, Artificial Sequence
  Synthetic Target Sequence/siNA sense region
ccucuugcugacaauaaau

SEQ ID NO: 1524 - RNA, 19 nt, Artificial Sequence
  Synthetic Target Sequence/siNA sense region
uuugcacuaacuugcacua

SEQ ID NO: 1525 - RNA, 19 nt, Artificial Sequence
  Synthetic Target Sequence/siNA sense region
agcacacacuuugcuuuug

SEQ ID NO: 1526 - RNA, 19 nt, Artificial Sequence
  Synthetic Target Sequence/siNA sense region
gcuugugcugacgguacuc

SEQ ID NO: 1527 - RNA, 19 nt, Artificial Sequence
  Synthetic Target Sequence/siNA sense region
cgacauaccuaucagcugc

SEQ ID NO: 1528 - RNA, 19 nt, Artificial Sequence
  Synthetic Target Sequence/siNA sense region
cgugcaagaucaguuucac

SEQ ID NO: 1529 - RNA, 19 nt, Artificial Sequence
  Synthetic Target Sequence/siNA sense region
ccaaaacuuuucaucagac

SEQ ID NO: 1530 - RNA, 19 nt, Artificial Sequence
  Synthetic Target Sequence/siNA sense region
caagaggagguucaacaag

SEQ ID NO: 1531 - RNA, 19 nt, Artificial Sequence
  Synthetic Target Sequence/siNA sense region
gagcucuacucgccacuuu

SEQ ID NO: 1532 - RNA, 19 nt, Artificial Sequence
  Synthetic Target Sequence/siNA sense region
uuucucauuguugcugcuc

SEQ ID NO: 1533 - RNA, 19 nt, Artificial Sequence
  Synthetic Target Sequence/siNA sense region
cuaguauuuuuaauacuuu

SEQ ID NO: 1534 - RNA, 19 nt, Artificial Sequence
  Synthetic Target Sequence/siNA sense region
ugcuucaccauuaagagaa

SEQ ID NO: 1535 - RNA, 19 nt, Artificial Sequence
  Synthetic Target Sequence/siNA sense region
aagacagaaugaaugagcu

SEQ ID NO: 1536 - RNA, 19 nt, Artificial Sequence
  Synthetic Target Sequence/siNA sense region
ucacuuuaauugacuucua

SEQ ID NO: 1537 - RNA, 19 nt, Artificial Sequence
  Synthetic Target Sequence/siNA sense region
auuugugcuuuuuagccuu

SEQ ID NO: 1538 - RNA, 19 nt, Artificial Sequence
  Synthetic Target Sequence/siNA sense region
uucugcuauuccuuguuuu

SEQ ID NO: 1539 - RNA, 19 nt, Artificial Sequence
  Synthetic Target Sequence/siNA sense region
uaauaaugcuuauuauauu

SEQ ID NO: 1540 - RNA, 19 nt, Artificial Sequence
  Synthetic Target Sequence/siNA sense region
uuugguuuucacucgaaau

SEQ ID NO: 1541 - RNA, 19 nt, Artificial Sequence
  Synthetic Target Sequence/siNA sense region
uccaggaucuagaagaacc

SEQ ID NO: 1542 - RNA, 19 nt, Artificial Sequence
  Synthetic Target Sequence/siNA sense region
cuuguaccaaagucuaaac

SEQ ID NO: 1543 - RNA, 19 nt, Artificial Sequence
  Synthetic Target Sequence/siNA sense region
cgaacaugaaacuucucau

SEQ ID NO: 1544 - RNA, 19 nt, Artificial Sequence
  Synthetic Target Sequence/siNA sense region
uuguuuugacuuguauuuc

SEQ ID NO: 1545 - RNA, 19 nt, Artificial Sequence
  Synthetic Target Sequence/siNA sense region
cucuaugcaguugcauaug

SEQ ID NO: 1546 - RNA, 19 nt, Artificial Sequence
  Synthetic Target Sequence/siNA sense region
gcacuguaguacagcgcug

SEQ ID NO: 1547 - RNA, 19 nt, Artificial Sequence
  Synthetic Target Sequence/siNA sense region
gugcaucuaauaaaccuca

SEQ ID NO: 1548 - RNA, 19 nt, Artificial Sequence
  Synthetic Target Sequence/siNA sense region
augugcuugaagauccuug

SEQ ID NO: 1549 - RNA, 19 nt, Artificial Sequence
  Synthetic Target Sequence/siNA sense region
guaagguacaacacuaggg

SEQ ID NO: 1550 - RNA, 19 nt, Artificial Sequence
  Synthetic Target Sequence/siNA sense region
gguaauacuuauagcacug

SEQ ID NO: 1551 - RNA, 19 nt, Artificial Sequence
  Synthetic Target Sequence/siNA sense region
gcuuggcuuugugcucuag

SEQ ID NO: 1552 - RNA, 19 nt, Artificial Sequence
  Synthetic Target Sequence/siNA sense region
ggaaagguuuuaccuuuuc

SEQ ID NO: 1553 - RNA, 19 nt, Artificial Sequence
  Synthetic Target Sequence/siNA sense region
cauagauggcacacuaugg

SEQ ID NO: 1554 - RNA, 19 nt, Artificial Sequence
  Synthetic Target Sequence/siNA sense region
guucaaacaugcacaccua

SEQ ID NO: 1555 - RNA, 19 nt, Artificial Sequence
  Synthetic Target Sequence/siNA sense region
aauguuacuaucaacuguc

SEQ ID NO: 1556 - RNA, 19 nt, Artificial Sequence
  Synthetic Target Sequence/siNA sense region
caagauccagcugguggug

SEQ ID NO: 1557 - RNA, 19 nt, Artificial Sequence
  Synthetic Target Sequence/siNA sense region
gcgcuuauagcuagguguu

SEQ ID NO: 1558 - RNA, 19 nt, Artificial Sequence
  Synthetic Target Sequence/siNA sense region
ugguaccuucaugaagguc

SEQ ID NO: 1559 - RNA, 19 nt, Artificial Sequence
  Synthetic Target Sequence/siNA sense region
caccaaacugcugcauuua

SEQ ID NO: 1560 - RNA, 19 nt, Artificial Sequence
  Synthetic Target Sequence/siNA sense region
agagacguacuuguuguuu

SEQ ID NO: 1561 - RNA, 19 nt, Artificial Sequence
  Synthetic Target Sequence/siNA sense region
uuaaauaaacgaacaaauu

SEQ ID NO: 1562 - RNA, 19 nt, Artificial Sequence
  Synthetic Target Sequence/siNA sense region
uaaaaugucugauaaugga

SEQ ID NO: 1563 - RNA, 19 nt, Artificial Sequence
  Synthetic Target Sequence/siNA sense region
accccaaucaaaccaacgu

SEQ ID NO: 1564 - RNA, 19 nt, Artificial Sequence
  Synthetic Target Sequence/siNA sense region
uagugccccccgcauuaca

SEQ ID NO: 1565 - RNA, 19 nt, Artificial Sequence
  Synthetic Target Sequence/siNA sense region
auuugguggacccacagau

SEQ ID NO: 1566 - RNA, 19 nt, Artificial Sequence
  Synthetic Target Sequence/siNA sense region
uucaacugacaauaaccag

SEQ ID NO: 1567 - RNA, 19 nt, Artificial Sequence
  Synthetic Target Sequence/siNA sense region
gaauggaggacgcaauggg

SEQ ID NO: 1568 - RNA, 19 nt, Artificial Sequence
  Synthetic Target Sequence/siNA sense region
ggcaaggccaaaacagcgc

SEQ ID NO: 1569 - RNA, 19 nt, Artificial Sequence
  Synthetic Target Sequence/siNA sense region
ccgaccccaagguuuaccc

SEQ ID NO: 1570 - RNA, 19 nt, Artificial Sequence
  Synthetic Target Sequence/siNA sense region
caauaauacugcgucuugg

SEQ ID NO: 1571 - RNA, 19 nt, Artificial Sequence
  Synthetic Target Sequence/siNA sense region
guucacagcucucacucag

SEQ ID NO: 1572 - RNA, 19 nt, Artificial Sequence
  Synthetic Target Sequence/siNA sense region
gcauggcaaggaggaacuu

SEQ ID NO: 1573 - RNA, 19 nt, Artificial Sequence
  Synthetic Target Sequence/siNA sense region
uagauucccucgaggccag

SEQ ID NO: 1574 - RNA, 19 nt, Artificial Sequence
  Synthetic Target Sequence/siNA sense region
gggcguuccaaucaacacc

SEQ ID NO: 1575 - RNA, 19 nt, Artificial Sequence
  Synthetic Target Sequence/siNA sense region
caauagugguccagaugac

SEQ ID NO: 1576 - RNA, 19 nt, Artificial Sequence
  Synthetic Target Sequence/siNA sense region
ccaaauuggcuacuaccga

SEQ ID NO: 1577 - RNA, 19 nt, Artificial Sequence
  Synthetic Target Sequence/siNA sense region
aagagcuacccgacgaguu

SEQ ID NO: 1578 - RNA, 19 nt, Artificial Sequence
  Synthetic Target Sequence/siNA sense region
ucgugguggugacggcaaa

SEQ ID NO: 1579 - RNA, 19 nt, Artificial Sequence
  Synthetic Target Sequence/siNA sense region
aaugaaagagcucagcccc

SEQ ID NO: 1580 - RNA, 19 nt, Artificial Sequence
  Synthetic Target Sequence/siNA sense region
cagaugguacuucuauuac

SEQ ID NO: 1581 - RNA, 19 nt, Artificial Sequence
  Synthetic Target Sequence/siNA sense region
ccuaggaacuggcccagaa

SEQ ID NO: 1582 - RNA, 19 nt, Artificial Sequence
  Synthetic Target Sequence/siNA sense region
agcuucacuucccuacggc

SEQ ID NO: 1583 - RNA, 19 nt, Artificial Sequence
  Synthetic Target Sequence/siNA sense region
cgcuaacaaagaaggcauc

SEQ ID NO: 1584 - RNA, 19 nt, Artificial Sequence
  Synthetic Target Sequence/siNA sense region
cguauggguugcaacugag

SEQ ID NO: 1585 - RNA, 19 nt, Artificial Sequence
  Synthetic Target Sequence/siNA sense region
gggagccuugaauacaccc

SEQ ID NO: 1586 - RNA, 19 nt, Artificial Sequence
  Synthetic Target Sequence/siNA sense region
caaagaccacauuggcacc

SEQ ID NO: 1587 - RNA, 19 nt, Artificial Sequence
  Synthetic Target Sequence/siNA sense region
ccgcaauccuaauaacaau

SEQ ID NO: 1588 - RNA, 19 nt, Artificial Sequence
  Synthetic Target Sequence/siNA sense region
ugcugccaccgugcuacaa

SEQ ID NO: 1589 - RNA, 19 nt, Artificial Sequence
  Synthetic Target Sequence/siNA sense region
acuuccucaaggaacaaca

SEQ ID NO: 1590 - RNA, 19 nt, Artificial Sequence
  Synthetic Target Sequence/siNA sense region
auugccaaaaggcuucuac

SEQ ID NO: 1591 - RNA, 19 nt, Artificial Sequence
  Synthetic Target Sequence/siNA sense region
cgcagagggaagcagaggc

SEQ ID NO: 1592 - RNA, 19 nt, Artificial Sequence
  Synthetic Target Sequence/siNA sense region
cggcagucaagccucuucu

SEQ ID NO: 1593 - RNA, 19 nt, Artificial Sequence
  Synthetic Target Sequence/siNA sense region
ucgcuccucaucacguagu

SEQ ID NO: 1594 - RNA, 19 nt, Artificial Sequence
  Synthetic Target Sequence/siNA sense region
ucgcgguaauucaagaaau

SEQ ID NO: 1595 - RNA, 19 nt, Artificial Sequence
  Synthetic Target Sequence/siNA sense region
uucaacuccuggcagcagu

SEQ ID NO: 1596 - RNA, 19 nt, Artificial Sequence
  Synthetic Target Sequence/siNA sense region
uaggggaaauucuccugcu

SEQ ID NO: 1597 - RNA, 19 nt, Artificial Sequence
  Synthetic Target Sequence/siNA sense region
ucgaauggcuagcggaggu

SEQ ID NO: 1598 - RNA, 19 nt, Artificial Sequence
  Synthetic Target Sequence/siNA sense region
uggugaaacugcccucgcg

SEQ ID NO: 1599 - RNA, 19 nt, Artificial Sequence
  Synthetic Target Sequence/siNA sense region
gcuauugcugcuagacaga

SEQ ID NO: 1600 - RNA, 19 nt, Artificial Sequence
  Synthetic Target Sequence/siNA sense region
auugaaccagcuugagagc

SEQ ID NO: 1601 - RNA, 19 nt, Artificial Sequence
  Synthetic Target Sequence/siNA sense region
caaaguuucugguaaaggc

SEQ ID NO: 1602 - RNA, 19 nt, Artificial Sequence
  Synthetic Target Sequence/siNA sense region
ccaacaacaacaaggccaa

SEQ ID NO: 1603 - RNA, 19 nt, Artificial Sequence
  Synthetic Target Sequence/siNA sense region
aacugucacuaagaaaucu

SEQ ID NO: 1604 - RNA, 19 nt, Artificial Sequence
  Synthetic Target Sequence/siNA sense region
ugcugcugaggcaucuaaa

SEQ ID NO: 1605 - RNA, 19 nt, Artificial Sequence
  Synthetic Target Sequence/siNA sense region
aaagccucgccaaaaacgu

SEQ ID NO: 1606 - RNA, 19 nt, Artificial Sequence
  Synthetic Target Sequence/siNA sense region
uacugccacaaaacaguac

SEQ ID NO: 1607 - RNA, 19 nt, Artificial Sequence
  Synthetic Target Sequence/siNA sense region
caacgucacucaagcauuu

SEQ ID NO: 1608 - RNA, 19 nt, Artificial Sequence
  Synthetic Target Sequence/siNA sense region
ugggagacgugguccagaa

SEQ ID NO: 1609 - RNA, 19 nt, Artificial Sequence
  Synthetic Target Sequence/siNA sense region
acaaacccaaggaaauuuc

SEQ ID NO: 1610 - RNA, 19 nt, Artificial Sequence
  Synthetic Target Sequence/siNA sense region
cggggaccaagaccuaauc

SEQ ID NO: 1611 - RNA, 19 nt, Artificial Sequence
  Synthetic Target Sequence/siNA sense region
cagacaaggaacugauuac

SEQ ID NO: 1612 - RNA, 19 nt, Artificial Sequence
  Synthetic Target Sequence/siNA sense region
caaacauuggccgcaaauu

SEQ ID NO: 1613 - RNA, 19 nt, Artificial Sequence
  Synthetic Target Sequence/siNA sense region
ugcacaauuugcuccaagu

SEQ ID NO: 1614 - RNA, 19 nt, Artificial Sequence
  Synthetic Target Sequence/siNA sense region
ugccucugcauucuuugga

SEQ ID NO: 1615 - RNA, 19 nt, Artificial Sequence
  Synthetic Target Sequence/siNA sense region
aaugucacgcauuggcaug

SEQ ID NO: 1616 - RNA, 19 nt, Artificial Sequence
  Synthetic Target Sequence/siNA sense region
ggaagucacaccuucggga

SEQ ID NO: 1617 - RNA, 19 nt, Artificial Sequence
  Synthetic Target Sequence/siNA sense region
aacauggcugacuuaucau

SEQ ID NO: 1618 - RNA, 19 nt, Artificial Sequence
  Synthetic Target Sequence/siNA sense region
uggagccauuaaauuggau

SEQ ID NO: 1619 - RNA, 19 nt, Artificial Sequence
  Synthetic Target Sequence/siNA sense region
ugacaaagauccacaauuc

SEQ ID NO: 1620 - RNA, 19 nt, Artificial Sequence
  Synthetic Target Sequence/siNA sense region
caaagacaacgucauacug

SEQ ID NO: 1621 - RNA, 19 nt, Artificial Sequence
  Synthetic Target Sequence/siNA sense region
gcugaacaagcacauugac

SEQ ID NO: 1622 - RNA, 19 nt, Artificial Sequence
  Synthetic Target Sequence/siNA sense region
cgcauacaaaacauuccca

SEQ ID NO: 1623 - RNA, 19 nt, Artificial Sequence
  Synthetic Target Sequence/siNA sense region
accaacagagccuaaaaag

SEQ ID NO: 1624 - RNA, 19 nt, Artificial Sequence
  Synthetic Target Sequence/siNA sense region
ggacaaaaagaaaaagacu

SEQ ID NO: 1625 - RNA, 19 nt, Artificial Sequence
  Synthetic Target Sequence/siNA sense region
ugaugaagcucagccuuug

SEQ ID NO: 1626 - RNA, 19 nt, Artificial Sequence
  Synthetic Target Sequence/siNA sense region
gccgcagagacaaaagaag

SEQ ID NO: 1627 - RNA, 19 nt, Artificial Sequence
  Synthetic Target Sequence/siNA sense region
gcagcccacugugacucuu

SEQ ID NO: 1628 - RNA, 19 nt, Artificial Sequence
  Synthetic Target Sequence/siNA sense region
ucuuccugcggcugacaug

SEQ ID NO: 1629 - RNA, 19 nt, Artificial Sequence
  Synthetic Target Sequence/siNA sense region
ggaugauuucuccagacaa

SEQ ID NO: 1630 - RNA, 19 nt, Artificial Sequence
  Synthetic Target Sequence/siNA sense region
acuucaaaauuccaugagu

SEQ ID NO: 1631 - RNA, 19 nt, Artificial Sequence
  Synthetic Target Sequence/siNA sense region
uggagcuucugcugauuca

SEQ ID NO: 1632 - RNA, 19 nt, Artificial Sequence
  Synthetic Target Sequence/siNA sense region
aacucaggcauaaacacuc

SEQ ID NO: 1633 - RNA, 19 nt, Artificial Sequence
  Synthetic Target Sequence/siNA sense region
caugaugaccacacaaggc

SEQ ID NO: 1634 - RNA, 19 nt, Artificial Sequence
  Synthetic Target Sequence/siNA sense region
cagaugggcuauguaaacg

SEQ ID NO: 1635 - RNA, 19 nt, Artificial Sequence
  Synthetic Target Sequence/siNA sense region
guuuucgcaauuccguuua

SEQ ID NO: 1636 - RNA, 19 nt, Artificial Sequence
  Synthetic Target Sequence/siNA sense region
acgauacauagucuacucu

SEQ ID NO: 1637 - RNA, 19 nt, Artificial Sequence
  Synthetic Target Sequence/siNA sense region
uugugcagaaugaauucuc

SEQ ID NO: 1638 - RNA, 19 nt, Artificial Sequence
  Synthetic Target Sequence/siNA sense region
cguaacuaaacagcacaag

SEQ ID NO: 1639 - RNA, 19 nt, Artificial Sequence
  Synthetic Target Sequence/siNA sense region
guagguuuaguuaacuuua

SEQ ID NO: 1640 - RNA, 19 nt, Artificial Sequence
  Synthetic Target Sequence/siNA sense region
aaucucacauagcaaucuu

SEQ ID NO: 1641 - RNA, 19 nt, Artificial Sequence
  Synthetic Target Sequence/siNA sense region
uuaaucaauguguaacauu

SEQ ID NO: 1642 - RNA, 19 nt, Artificial Sequence
  Synthetic Target Sequence/siNA sense region
uagggaggacuugaaagag

SEQ ID NO: 1643 - RNA, 19 nt, Artificial Sequence
  Synthetic Target Sequence/siNA sense region
gccaccacauuuucaucga

SEQ ID NO: 1644 - RNA, 19 nt, Artificial Sequence
  Synthetic Target Sequence/siNA sense region
aggccacgcggaguacgau

SEQ ID NO: 1645 - RNA, 19 nt, Artificial Sequence
  Synthetic Target Sequence/siNA sense region
ucgaggguacagugaauaa

SEQ ID NO: 1646 - RNA, 19 nt, Artificial Sequence
  Synthetic Target Sequence/siNA sense region
augcuagggagagcugccu

SEQ ID NO: 1647 - RNA, 19 nt, Artificial Sequence
  Synthetic Target Sequence/siNA sense region
uauauggaagagcccuaau

SEQ ID NO: 1648 - RNA, 19 nt, Artificial Sequence
  Synthetic Target Sequence/siNA sense region
uguguaaaauuaauuuuag

SEQ ID NO: 1649 - RNA, 19 nt, Artificial Sequence
  Synthetic Target Sequence/siNA sense region
guagugcuauccccaugug

SEQ ID NO: 1650 - RNA, 19 nt, Artificial Sequence
  Synthetic Target Sequence/siNA sense region
gauuuuaauagcuucuuag

SEQ ID NO: 1651 - RNA, 19 nt, Artificial Sequence
  Synthetic Target Sequence/siNA sense region
ggagaaugacaaaaaaaaa

SEQ ID NO: 1652 - RNA, 19 nt, Artificial Sequence
  Synthetic siNA antisense region
ugguuggcuuuuccugggu

SEQ ID NO: 1653 - RNA, 19 nt, Artificial Sequence
  Synthetic siNA antisense region
ucuacaagagaucgagguu

SEQ ID NO: 1654 - RNA, 19 nt, Artificial Sequence
  Synthetic siNA antisense region
guucguuuagagaacagau

SEQ ID NO: 1655 - RNA, 19 nt, Artificial Sequence
  Synthetic siNA antisense region
agcuacacagauuuuaaag

SEQ ID NO: 1656 - RNA, 19 nt, Artificial Sequence
  Synthetic siNA antisense region
ggcaugcagccgagcgaca

SEQ ID NO: 1657 - RNA, 19 nt, Artificial Sequence
  Synthetic siNA antisense region
uacugcguaggugcacuag

SEQ ID NO: 1658 - RNA, 19 nt, Artificial Sequence
  Synthetic siNA antisense region
aaaauuuauuauuguuuau

SEQ ID NO: 1659 - RNA, 19 nt, Artificial Sequence
  Synthetic siNA antisense region
uuucuugucaacgacagua

SEQ ID NO: 1660 - RNA, 19 nt, Artificial Sequence
  Synthetic siNA antisense region
agagggacgaguuacucgu

SEQ ID NO: 1661 - RNA, 19 nt, Artificial Sequence
  Synthetic siNA antisense region
ccguaagcagucugcagaa

SEQ ID NO: 1662 - RNA, 19 nt, Artificial Sequence
  Synthetic siNA antisense region
acugcaacacggacgaaac

SEQ ID NO: 1663 - RNA, 19 nt, Artificial Sequence
  Synthetic siNA antisense region
uagguaugcugaugaucga

SEQ ID NO: 1664 - RNA, 19 nt, Artificial Sequence
  Synthetic siNA antisense region
ucacacccggacgaaaccu

SEQ ID NO: 1665 - RNA, 19 nt, Artificial Sequence
  Synthetic siNA antisense region
cuccaucuuaccuuucggu

SEQ ID NO: 1666 - RNA, 19 nt, Artificial Sequence
  Synthetic siNA antisense region
gacaccaagaacaaggcuc

SEQ ID NO: 1667 - RNA, 19 nt, Artificial Sequence
  Synthetic siNA antisense region
gacguguguuuucucguug

SEQ ID NO: 1668 - RNA, 19 nt, Artificial Sequence
  Synthetic siNA antisense region
gacaggcaaacugaguugg

SEQ ID NO: 1669 - RNA, 19 nt, Artificial Sequence
  Synthetic siNA antisense region
cacgucucuaaccugaagg

SEQ ID NO: 1670 - RNA, 19 nt, Artificial Sequence
  Synthetic siNA antisense region
cccgaagccacgcacuagc

SEQ ID NO: 1671 - RNA, 19 nt, Artificial Sequence
  Synthetic siNA antisense region
ggccucuuccacagagucc

SEQ ID NO: 1672 - RNA, 19 nt, Artificial Sequence
  Synthetic siNA antisense region
uucacgugccuccgauagg

SEQ ID NO: 1673 - RNA, 19 nt, Artificial Sequence
  Synthetic siNA antisense region
agugccauuuuugaggugu

SEQ ID NO: 1674 - RNA, 19 nt, Artificial Sequence
  Synthetic siNA antisense region
cagcucuacuagaccacaa

SEQ ID NO: 1675 - RNA, 19 nt, Artificial Sequence
  Synthetic siNA antisense region
gggcaguacgccuuuuucc

SEQ ID NO: 1676 - RNA, 19 nt, Artificial Sequence
  Synthetic siNA antisense region
auagggcuguucaagcugg

SEQ ID NO: 1677 - RNA, 19 nt, Artificial Sequence
  Synthetic siNA antisense region
agaacguuuaaugaacaca

SEQ ID NO: 1678 - RNA, 19 nt, Artificial Sequence
  Synthetic siNA antisense region
auuggugcuuaaggcauca

SEQ ID NO: 1679 - RNA, 19 nt, Artificial Sequence
  Synthetic siNA antisense region
aacgaccuuguggccguga

SEQ ID NO: 1680 - RNA, 19 nt, Artificial Sequence
  Synthetic siNA antisense region
cauuucugcaaccagcuca

SEQ ID NO: 1681 - RNA, 19 nt, Artificial Sequence
  Synthetic siNA antisense region
accguacugaaugccgucc

SEQ ID NO: 1682 - RNA, 19 nt, Artificial Sequence
  Synthetic siNA antisense region
caguguuauaccgcuacga

SEQ ID NO: 1683 - RNA, 19 nt, Artificial Sequence
  Synthetic siNA antisense region
auguggcacgaguacuccc

SEQ ID NO: 1684 - RNA, 19 nt, Artificial Sequence
  Synthetic siNA antisense region
aauugggguuucgcccaca

SEQ ID NO: 1685 - RNA, 19 nt, Artificial Sequence
  Synthetic siNA antisense region
aagaacauugcgguaugca

SEQ ID NO: 1686 - RNA, 19 nt, Artificial Sequence
  Synthetic siNA antisense region
auuaccguucuuacgaaga

SEQ ID NO: 1687 - RNA, 19 nt, Artificial Sequence
  Synthetic siNA antisense region
augaccaccggcucccuua

SEQ ID NO: 1688 - RNA, 19 nt, Artificial Sequence
  Synthetic siNA antisense region
uagaucgaugccauagcua

SEQ ID NO: 1689 - RNA, 19 nt, Artificial Sequence
  Synthetic siNA antisense region
accuaagucauaagacuuu

SEQ ID NO: 1690 - RNA, 19 nt, Artificial Sequence
  Synthetic siNA antisense region
aucagugccaagcucguca

SEQ ID NO: 1691 - RNA, 19 nt, Artificial Sequence
  Synthetic siNA antisense region
uucauaaucuucaauggga

SEQ ID NO: 1692 - RNA, 19 nt, Artificial Sequence
  Synthetic siNA antisense region
cuuaguguuccaguuuugu

SEQ ID NO: 1693 - RNA, 19 nt, Artificial Sequence
  Synthetic siNA antisense region
gagugcaccacugccaugc

SEQ ID NO: 1694 - RNA, 19 nt, Artificial Sequence
  Synthetic siNA antisense region
cucacgagugaguucacgg

SEQ ID NO: 1695 - RNA, 19 nt, Artificial Sequence
  Synthetic siNA antisense region
gacugcaccuccauugagc

SEQ ID NO: 1696 - RNA, 19 nt, Artificial Sequence
  Synthetic siNA antisense region
guugucgacauagcgagug

SEQ ID NO: 1697 - RNA, 19 nt, Artificial Sequence
  Synthetic siNA antisense region
aucugggccacagaaauug

SEQ ID NO: 1698 - RNA, 19 nt, Artificial Sequence
  Synthetic siNA antisense region
gcaaucaagaggguaccca

SEQ ID NO: 1699 - RNA, 19 nt, Artificial Sequence
  Synthetic siNA antisense region
ugcgagaaaaucuuugaug

SEQ ID NO: 1700 - RNA, 19 nt, Artificial Sequence
  Synthetic siNA antisense region
cauugacuugcccgcgcgu

SEQ ID NO: 1701 - RNA, 19 nt, Artificial Sequence
  Synthetic siNA antisense region
uuguucggaaagagugcac

SEQ ID NO: 1702 - RNA, 19 nt, Artificial Sequence
  Synthetic siNA antisense region
cgacucgauguaaucaagu

SEQ ID NO: 1703 - RNA, 19 nt, Artificial Sequence
  Synthetic siNA antisense region
gcaguagacaccucucuuc

SEQ ID NO: 1704 - RNA, 19 nt, Artificial Sequence
  Synthetic siNA antisense region
augcucauggucacggcag

SEQ ID NO: 1705 - RNA, 19 nt, Artificial Sequence
  Synthetic siNA antisense region
agugaaccaggcaauuuca

SEQ ID NO: 1706 - RNA, 19 nt, Artificial Sequence
  Synthetic siNA antisense region
gcucuuaucagagcgcuca

SEQ ID NO: 1707 - RNA, 19 nt, Artificial Sequence
  Synthetic siNA antisense region
gggugucuggugcucguag

SEQ ID NO: 1708 - RNA, 19 nt, Artificial Sequence
  Synthetic siNA antisense region
ggcacucuuaauuucgaag

SEQ ID NO: 1709 - RNA, 19 nt, Artificial Sequence
  Synthetic siNA antisense region
gaaagugucaaauuucuug

SEQ ID NO: 1710 - RNA, 19 nt, Artificial Sequence
  Synthetic siNA antisense region
cuuugggcauuccccuuug

SEQ ID NO: 1711 - RNA, 19 nt, Artificial Sequence
  Synthetic siNA antisense region
guuaagaggaaacacaaac

SEQ ID NO: 1712 - RNA, 19 nt, Artificial Sequence
  Synthetic siNA antisense region
aaugacuuugacuuuugag

SEQ ID NO: 1713 - RNA, 19 nt, Artificial Sequence
  Synthetic siNA antisense region
cuuuucaacacgugguuga

SEQ ID NO: 1714 - RNA, 19 nt, Artificial Sequence
  Synthetic siNA antisense region
gaaacccucagucuuuuuc

SEQ ID NO: 1715 - RNA, 19 nt, Artificial Sequence
  Synthetic siNA antisense region
agagcguauacgccccaug

SEQ ID NO: 1716 - RNA, 19 nt, Artificial Sequence
  Synthetic siNA antisense region
agaugcaacaggguacaca

SEQ ID NO: 1717 - RNA, 19 nt, Artificial Sequence
  Synthetic siNA antisense region
auuguuacacuccugugga

SEQ ID NO: 1718 - RNA, 19 nt, Artificial Sequence
  Synthetic siNA antisense region
caagguagacaagugcaua

SEQ ID NO: 1719 - RNA, 19 nt, Artificial Sequence
  Synthetic siNA antisense region
gcaaugauuacauuucauc

SEQ ID NO: 1720 - RNA, 19 nt, Artificial Sequence
  Synthetic siNA antisense region
cugccaugaaacuucaucg

SEQ ID NO: 1721 - RNA, 19 nt, Artificial Sequence
  Synthetic siNA antisense region
uuucagaaagucgcacguc

SEQ ID NO: 1722 - RNA, 19 nt, Artificial Sequence
  Synthetic siNA antisense region
acaauguucacaaguggcu

SEQ ID NO: 1723 - RNA, 19 nt, Artificial Sequence
  Synthetic siNA antisense region
aacuaaauuuucagugcca

SEQ ID NO: 1724 - RNA, 19 nt, Artificial Sequence
  Synthetic siNA antisense region
uguaguagguccuucaaua

SEQ ID NO: 1725 - RNA, 19 nt, Artificial Sequence
  Synthetic siNA antisense region
aguagguagguacccacau

SEQ ID NO: 1726 - RNA, 19 nt, Artificial Sequence
  Synthetic siNA antisense region
cauuuucacuacagcauua

SEQ ID NO: 1727 - RNA, 19 nt, Artificial Sequence
  Synthetic siNA antisense region
uugacaggcaggacauggc

SEQ ID NO: 1728 - RNA, 19 nt, Artificial Sequence
  Synthetic siNA antisense region
agguccaaucucugggucu

SEQ ID NO: 1729 - RNA, 19 nt, Artificial Sequence
  Synthetic siNA antisense region
aucugcaacacuaugcuca

SEQ ID NO: 1730 - RNA, 19 nt, Artificial Sequence
  Synthetic siNA antisense region
guuugagugguugugauaa

SEQ ID NO: 1731 - RNA, 19 nt, Artificial Sequence
  Synthetic siNA antisense region
gcggagucgaguuucaaug

SEQ ID NO: 1732 - RNA, 19 nt, Artificial Sequence
  Synthetic siNA antisense region
ucuaguccuaccucccuug

SEQ ID NO: 1733 - RNA, 19 nt, Artificial Sequence
  Synthetic siNA antisense region
cacacagccuccaaaacau

SEQ ID NO: 1734 - RNA, 19 nt, Artificial Sequence
  Synthetic siNA antisense region
gcagccaacauaggcaaac

SEQ ID NO: 1735 - RNA, 19 nt, Artificial Sequence
  Synthetic siNA antisense region
guaggcacgcuuauuauag

SEQ ID NO: 1736 - RNA, 19 nt, Artificial Sequence
  Synthetic siNA antisense region
acuagcacgaggaacccag

SEQ ID NO: 1737 - RNA, 19 nt, Artificial Sequence
  Synthetic siNA antisense region
gccugagccaauaucagca

SEQ ID NO: 1738 - RNA, 19 nt, Artificial Sequence
  Synthetic siNA antisense region
accaguaaugccaguaugg

SEQ ID NO: 1739 - RNA, 19 nt, Artificial Sequence
  Synthetic siNA antisense region
caaggucuccacauuguca

SEQ ID NO: 1740 - RNA, 19 nt, Artificial Sequence
  Synthetic siNA antisense region
cucaaggagauccucauuc

SEQ ID NO: 1741 - RNA, 19 nt, Artificial Sequence
  Synthetic siNA antisense region
acguucacgacucaguauc

SEQ ID NO: 1742 - RNA, 19 nt, Artificial Sequence
  Synthetic siNA antisense region
aacaauguuaauguuaaca

SEQ ID NO: 1743 - RNA, 19 nt, Artificial Sequence
  Synthetic siNA antisense region
auucaaaugaaaaucgcca

SEQ ID NO: 1744 - RNA, 19 nt, Artificial Sequence
  Synthetic siNA antisense region
aaugauggcaaccucuuca

SEQ ID NO: 1745 - RNA, 19 nt, Artificial Sequence
  Synthetic siNA antisense region
agcagagaaagaugccaaa

SEQ ID NO: 1746 - RNA, 19 nt, Artificial Sequence
  Synthetic siNA antisense region
aauaaaggcacuuguagaa

SEQ ID NO: 1747 - RNA, 19 nt, Artificial Sequence
  Synthetic siNA antisense region
aagacucuuuauaguguca

SEQ ID NO: 1748 - RNA, 19 nt, Artificial Sequence
  Synthetic siNA antisense region
uuugaaagacuuguaauca

SEQ ID NO: 1749 - RNA, 19 nt, Artificial Sequence
  Synthetic siNA antisense region
gcaggacucaacaaugguu

SEQ ID NO: 1750 - RNA, 19 nt, Artificial Sequence
  Synthetic siNA antisense region
gguaacuuuauaguuaccg

SEQ ID NO: 1751 - RNA, 19 nt, Artificial Sequence
  Synthetic siNA antisense region
uuuuacgggcuuucccuug

SEQ ID NO: 1752 - RNA, 19 nt, Artificial Sequence
  Synthetic siNA antisense region
uccaauguuccaagcaccu

SEQ ID NO: 1753 - RNA, 19 nt, Artificial Sequence
  Synthetic siNA antisense region
uaaaacugaucucuguugu

SEQ ID NO: 1754 - RNA, 19 nt, Artificial Sequence
  Synthetic siNA antisense region
aaaaccacacagugguguu

SEQ ID NO: 1755 - RNA, 19 nt, Artificial Sequence
  Synthetic siNA antisense region
accagcagccugugaggga

SEQ ID NO: 1756 - RNA, 19 nt, Artificial Sequence
  Synthetic siNA antisense region
aaaaauugaucugauaaca

SEQ ID NO: 1757 - RNA, 19 nt, Artificial Sequence
  Synthetic siNA antisense region
ugcaucaagugugcgcgca

SEQ ID NO: 1758 - RNA, 19 nt, Artificial Sequence
  Synthetic siNA antisense region
aggaauugagugguuugcu

SEQ ID NO: 1759 - RNA, 19 nt, Artificial Sequence
  Synthetic siNA antisense region
agcugcucuuugcaaauca

SEQ ID NO: 1760 - RNA, 19 nt, Artificial Sequence
  Synthetic siNA antisense region
accaucaaguauggugaca

SEQ ID NO: 1761 - RNA, 19 nt, Artificial Sequence
  Synthetic siNA antisense region
uaaugacuguucagaaaua

SEQ ID NO: 1762 - RNA, 19 nt, Artificial Sequence
  Synthetic siNA antisense region
cauggcgucgacaagacgu

SEQ ID NO: 1763 - RNA, 19 nt, Artificial Sequence
  Synthetic siNA antisense region
caggucugaaguauaaacc

SEQ ID NO: 1764 - RNA, 19 nt, Artificial Sequence
  Synthetic siNA antisense region
aaugacacuguuggugagc

SEQ ID NO: 1765 - RNA, 19 nt, Artificial Sequence
  Synthetic siNA antisense region
aguuacauaugccauaaua

SEQ ID NO: 1766 - RNA, 19 nt, Artificial Sequence
  Synthetic siNA antisense region
cuguuguacaagaccacca

SEQ ID NO: 1767 - RNA, 19 nt, Artificial Sequence
  Synthetic siNA antisense region
agacaaccacugagaaguc

SEQ ID NO: 1768 - RNA, 19 nt, Artificial Sequence
  Synthetic siNA antisense region
aguagugcccaaaagauua

SEQ ID NO: 1769 - RNA, 19 nt, Artificial Sequence
  Synthetic siNA antisense region
aggccugaguuuuucaaca

SEQ ID NO: 1770 - RNA, 19 nt, Artificial Sequence
  Synthetic siNA antisense region
cucaauccauucaaagaua

SEQ ID NO: 1771 - RNA, 19 nt, Artificial Sequence
  Synthetic siNA antisense region
uccugcacuaaguuucgcc

SEQ ID NO: 1772 - RNA, 19 nt, Artificial Sequence
  Synthetic siNA antisense region
auccuugagaaauucaacu

SEQ ID NO: 1773 - RNA, 19 nt, Artificial Sequence
  Synthetic siNA antisense region
uuugagaaucucccaagca

SEQ ID NO: 1774 - RNA, 19 nt, Artificial Sequence
  Synthetic siNA antisense region
aacaccuguaaugagaaau

SEQ ID NO: 1775 - RNA, 19 nt, Artificial Sequence
  Synthetic siNA antisense region
acccuugacgaugucaaaa

SEQ ID NO: 1776 - RNA, 19 nt, Artificial Sequence
  Synthetic siNA antisense region
ugaagcaaccuguauuuga

SEQ ID NO: 1777 - RNA, 19 nt, Artificial Sequence
  Synthetic siNA antisense region
acaauccuugauguuaucu

SEQ ID NO: 1778 - RNA, 19 nt, Artificial Sequence
  Synthetic siNA antisense region
aucaaugaagcauuuuaca

SEQ ID NO: 1779 - RNA, 19 nt, Artificial Sequence
  Synthetic siNA antisense region
gagugccuuguuaacaaca

SEQ ID NO: 1780 - RNA, 19 nt, Artificial Sequence
  Synthetic siNA antisense region
uugaucaaugcacauuucg

SEQ ID NO: 1781 - RNA, 19 nt, Artificial Sequence
  Synthetic siNA antisense region
ugcgccagcgauagugacu

SEQ ID NO: 1782 - RNA, 19 nt, Artificial Sequence
  Synthetic siNA antisense region
guugagugaucgcaacuuu

SEQ ID NO: 1783 - RNA, 19 nt, Artificial Sequence
  Synthetic siNA antisense region
gaugaagacuucaccuaag

SEQ ID NO: 1784 - RNA, 19 nt, Artificial Sequence
  Synthetic siNA antisense region
aagucccuugcuuugagcg

SEQ ID NO: 1785 - RNA, 19 nt, Artificial Sequence
  Synthetic siNA antisense region
acguauacacugacgguaa

SEQ ID NO: 1786 - RNA, 19 nt, Artificial Sequence
  Synthetic siNA antisense region
uugcagcugcuccuugcca

SEQ ID NO: 1787 - RNA, 19 nt, Artificial Sequence
  Synthetic siNA antisense region
cuuaagaggcaugaguagu

SEQ ID NO: 1788 - RNA, 19 nt, Artificial Sequence
  Synthetic siNA antisense region
gguuacuucuuuuggugcc

SEQ ID NO: 1789 - RNA, 19 nt, Artificial Sequence
  Synthetic siNA antisense region
ugaaucaccuucaagaaag

SEQ ID NO: 1790 - RNA, 19 nt, Artificial Sequence
  Synthetic siNA antisense region
gguaaguacugugucaugu

SEQ ID NO: 1791 - RNA, 19 nt, Artificial Sequence
  Synthetic siNA antisense region
gagaacaaccuccucagag

SEQ ID NO: 1792 - RNA, 19 nt, Artificial Sequence
  Synthetic siNA antisense region
uucgaguucaccguucuug

SEQ ID NO: 1793 - RNA, 19 nt, Artificial Sequence
  Synthetic siNA antisense region
aacgggcgucucgagugcu

SEQ ID NO: 1794 - RNA, 19 nt, Artificial Sequence
  Synthetic siNA antisense region
uccauuugugaagcuauca

SEQ ID NO: 1795 - RNA, 19 nt, Artificial Sequence
  Synthetic siNA antisense region
uggugugccgacgauagcu

SEQ ID NO: 1796 - RNA, 19 nt, Artificial Sequence
  Synthetic siNA antisense region
gaggccauuuacacagacu

SEQ ID NO: 1797 - RNA, 19 nt, Artificial Sequence
  Synthetic siNA antisense region
cuuaaucucuaagagcaug

SEQ ID NO: 1798 - RNA, 19 nt, Artificial Sequence
  Synthetic siNA antisense region
gcaguauuguucuuugucc

SEQ ID NO: 1799 - RNA, 19 nt, Artificial Sequence
  Synthetic siNA antisense region
uaaaccaggagacaaugcg

SEQ ID NO: 1800 - RNA, 19 nt, Artificial Sequence
  Synthetic siNA antisense region
gacauuguuuguagccagu

SEQ ID NO: 1801 - RNA, 19 nt, Artificial Sequence
  Synthetic siNA antisense region
acccccuuuuaagcgaaag

SEQ ID NO: 1802 - RNA, 19 nt, Artificial Sequence
  Synthetic siNA antisense region
uacaccuuuaauuggugca

SEQ ID NO: 1803 - RNA, 19 nt, Artificial Sequence
  Synthetic siNA antisense region
aguaucuucuccaaagguu

SEQ ID NO: 1804 - RNA, 19 nt, Artificial Sequence
  Synthetic siNA antisense region
accuugaacuucccaaaca

SEQ ID NO: 1805 - RNA, 19 nt, Artificial Sequence
  Synthetic siNA antisense region
gauucucacauucuuguaa

SEQ ID NO: 1806 - RNA, 19 nt, Artificial Sequence
  Synthetic siNA antisense region
uucaucaagcucaaaugug

SEQ ID NO: 1807 - RNA, 19 nt, Artificial Sequence
  Synthetic siNA antisense region
aagcacuuugucaacacgu

SEQ ID NO: 1808 - RNA, 19 nt, Artificial Sequence
  Synthetic siNA antisense region
gacagagcacuuuucauua

SEQ ID NO: 1809 - RNA, 19 nt, Artificial Sequence
  Synthetic siNA antisense region
accggauucaacaguguag

SEQ ID NO: 1810 - RNA, 19 nt, Artificial Sequence
  Synthetic siNA antisense region
aaacucaguaacuucggua

SEQ ID NO: 1811 - RNA, 19 nt, Artificial Sequence
  Synthetic siNA antisense region
cucugcuacaacacaugca

SEQ ID NO: 1812 - RNA, 19 nt, Artificial Sequence
  Synthetic siNA antisense region
uaaagucuucacaacagcc

SEQ ID NO: 1813 - RNA, 19 nt, Artificial Sequence
  Synthetic siNA antisense region
gagaucagaaacugguugu

SEQ ID NO: 1814 - RNA, 19 nt, Artificial Sequence
  Synthetic siNA antisense region
aauacccauguugguaagg

SEQ ID NO: 1815 - RNA, 19 nt, Artificial Sequence
  Synthetic siNA antisense region
acuccacucaucaagauca

SEQ ID NO: 1816 - RNA, 19 nt, Artificial Sequence
  Synthetic siNA antisense region
uaaguagaauguagcuaca

SEQ ID NO: 1817 - RNA, 19 nt, Artificial Sequence
  Synthetic siNA antisense region
uucaccagcaucaucaaau

SEQ ID NO: 1818 - RNA, 19 nt, Artificial Sequence
  Synthetic siNA antisense region
acgugaugaaaaguuuucu

SEQ ID NO: 1819 - RNA, 19 nt, Artificial Sequence
  Synthetic siNA antisense region
guaaaaggaacaauacaua

SEQ ID NO: 1820 - RNA, 19 nt, Artificial Sequence
  Synthetic siNA antisense region
uucuuccucaucuggaggg

SEQ ID NO: 1821 - RNA, 19 nt, Artificial Sequence
  Synthetic siNA antisense region
acacucugcaucguccucu

SEQ ID NO: 1822 - RNA, 19 nt, Artificial Sequence
  Synthetic siNA antisense region
aucaauuucuucuuccuca

SEQ ID NO: 1823 - RNA, 19 nt, Artificial Sequence
  Synthetic siNA antisense region
cucauguucacagguuuca

SEQ ID NO: 1824 - RNA, 19 nt, Artificial Sequence
  Synthetic siNA antisense region
aucauccucuguaccguac

SEQ ID NO: 1825 - RNA, 19 nt, Artificial Sequence
  Synthetic siNA antisense region
cagagggagaccuugauaa

SEQ ID NO: 1826 - RNA, 19 nt, Artificial Sequence
  Synthetic siNA antisense region
agcugaggcaccaaauucc

SEQ ID NO: 1827 - RNA, 19 nt, Artificial Sequence
  Synthetic siNA antisense region
cucaacucgaacuguuuca

SEQ ID NO: 1828 - RNA, 19 nt, Artificial Sequence
  Synthetic siNA antisense region
gucuuccucuucuucuucc

SEQ ID NO: 1829 - RNA, 19 nt, Artificial Sequence
  Synthetic siNA antisense region
aguaguaucauccagccag

SEQ ID NO: 1830 - RNA, 19 nt, Artificial Sequence
  Synthetic siNA antisense region
cucaaucucugauugcuca

SEQ ID NO: 1831 - RNA, 19 nt, Artificial Sequence
  Synthetic siNA antisense region
uguagguucugguucuggc

SEQ ID NO: 1832 - RNA, 19 nt, Artificial Sequence
  Synthetic siNA antisense region
auuaacugguucuucaggu

SEQ ID NO: 1833 - RNA, 19 nt, Artificial Sequence
  Synthetic siNA antisense region
uaaauaaccaguaaacuga

SEQ ID NO: 1834 - RNA, 19 nt, Artificial Sequence
  Synthetic siNA antisense region
aacauugucaguaaguuuu

SEQ ID NO: 1835 - RNA, 19 nt, Artificial Sequence
  Synthetic siNA antisense region
gucaacacauuuaauggca

SEQ ID NO: 1836 - RNA, 19 nt, Artificial Sequence
  Synthetic siNA antisense region
uugugccuccuuaacgaug

SEQ ID NO: 1837 - RNA, 19 nt, Artificial Sequence
  Synthetic siNA antisense region
caccauaggauuagcacuu

SEQ ID NO: 1838 - RNA, 19 nt, Artificial Sequence
  Synthetic siNA antisense region
guuagcagcauuuacaauc

SEQ ID NO: 1839 - RNA, 19 nt, Artificial Sequence
  Synthetic siNA antisense region
accauguuucagguguaug

SEQ ID NO: 1840 - RNA, 19 nt, Artificial Sequence
  Synthetic siNA antisense region
ugcaccugcuacaccacca

SEQ ID NO: 1841 - RNA, 19 nt, Artificial Sequence
  Synthetic siNA antisense region
auugguugccuuguugagu

SEQ ID NO: 1842 - RNA, 19 nt, Artificial Sequence
  Synthetic siNA antisense region
cuccuuuugcauggcacca

SEQ ID NO: 1843 - RNA, 19 nt, Artificial Sequence
  Synthetic siNA antisense region
cuuaauguaaucaucacuc

SEQ ID NO: 1844 - RNA, 19 nt, Artificial Sequence
  Synthetic siNA antisense region
uguaagagggccauuuagc

SEQ ID NO: 1845 - RNA, 19 nt, Artificial Sequence
  Synthetic siNA antisense region
caaacaagacccuccuacu

SEQ ID NO: 1846 - RNA, 19 nt, Artificial Sequence
  Synthetic siNA antisense region
aagauuauguccagaaagc

SEQ ID NO: 1847 - RNA, 19 nt, Artificial Sequence
  Synthetic siNA antisense region
augcagacacuucuuagca

SEQ ID NO: 1848 - RNA, 19 nt, Artificial Sequence
  Synthetic siNA antisense region
uagguuagguccaacaaca

SEQ ID NO: 1849 - RNA, 19 nt, Artificial Sequence
  Synthetic siNA antisense region
gauguccucaccugcauuu

SEQ ID NO: 1850 - RNA, 19 nt, Artificial Sequence
  Synthetic siNA antisense region
ugcugccuuaagaagcugg

SEQ ID NO: 1851 - RNA, 19 nt, Artificial Sequence
  Synthetic siNA antisense region
ugaauugaaauuuucauau

SEQ ID NO: 1852 - RNA, 19 nt, Artificial Sequence
  Synthetic siNA antisense region
ugcaaguaagauguccugu

SEQ ID NO: 1853 - RNA, 19 nt, Artificial Sequence
  Synthetic siNA antisense region
gccugcugacaacaauggu

SEQ ID NO: 1854 - RNA, 19 nt, Artificial Sequence
  Synthetic siNA antisense region
ugguuuagcaccaaauaug

SEQ ID NO: 1855 - RNA, 19 nt, Artificial Sequence
  Synthetic siNA antisense region
cacuuguaaagacugaagu

SEQ ID NO: 1856 - RNA, 19 nt, Artificial Sequence
  Synthetic siNA antisense region
acgaaccgucugcacgcac

SEQ ID NO: 1857 - RNA, 19 nt, Artificial Sequence
  Synthetic siNA antisense region
ugcaauauaaaccugugua

SEQ ID NO: 1858 - RNA, 19 nt, Artificial Sequence
  Synthetic siNA antisense region
aagagcuuugucauugacu

SEQ ID NO: 1859 - RNA, 19 nt, Artificial Sequence
  Synthetic siNA antisense region
caugacaaccugcucauaa

SEQ ID NO: 1860 - RNA, 19 nt, Artificial Sequence
  Synthetic siNA antisense region
cagguuaucaagauaaucc

SEQ ID NO: 1861 - RNA, 19 nt, Artificial Sequence
  Synthetic siNA antisense region
ugcuuccacucuaggcuuc

SEQ ID NO: 1862 - RNA, 19 nt, Artificial Sequence
  Synthetic siNA antisense region
uggcuccucuuguuuaggu

SEQ ID NO: 1863 - RNA, 19 nt, Artificial Sequence
  Synthetic siNA antisense region
ggaaucuucuguguuuggu

SEQ ID NO: 1864 - RNA, 19 nt, Artificial Sequence
  Synthetic siNA antisense region
agauuucuccucaguuuug

SEQ ID NO: 1865 - RNA, 19 nt, Artificial Sequence
  Synthetic siNA antisense region
gacaggcuucuguacgaca

SEQ ID NO: 1866 - RNA, 19 nt, Artificial Sequence
  Synthetic siNA antisense region
aauuuuuggcuucacaucg

SEQ ID NO: 1867 - RNA, 19 nt, Artificial Sequence
  Synthetic siNA antisense region
cucaucaaugcaggccuua

SEQ ID NO: 1868 - RNA, 19 nt, Artificial Sequence
  Synthetic siNA antisense region
uuccaguguugugguaacc

SEQ ID NO: 1869 - RNA, 19 nt, Artificial Sequence
  Synthetic siNA antisense region
gguaagaaacuuaguuucu

SEQ ID NO: 1870 - RNA, 19 nt, Artificial Sequence
  Synthetic siNA antisense region
aaacaagaguaacuuauug

SEQ ID NO: 1871 - RNA, 19 nt, Artificial Sequence
  Synthetic siNA antisense region
cuuaccauugauaucagca

SEQ ID NO: 1872 - RNA, 19 nt, Artificial Sequence
  Synthetic siNA antisense region
cugagaaucaugguaaagc

SEQ ID NO: 1873 - RNA, 19 nt, Artificial Sequence
  Synthetic siNA antisense region
uucaccucuaagcauguuc

SEQ ID NO: 1874 - RNA, 19 nt, Artificial Sequence
  Synthetic siNA antisense region
cucaaggaaagacauaucu

SEQ ID NO: 1875 - RNA, 19 nt, Artificial Sequence
  Synthetic siNA antisense region
cauguaaggugcauccuuc

SEQ ID NO: 1876 - RNA, 19 nt, Artificial Sequence
  Synthetic siNA antisense region
agugauaacaucaccuacc

SEQ ID NO: 1877 - RNA, 19 nt, Artificial Sequence
  Synthetic siNA antisense region
acaagugauaucaccacua

SEQ ID NO: 1878 - RNA, 19 nt, Artificial Sequence
  Synthetic siNA antisense region
uuuggaggguauuacaaca

SEQ ID NO: 1879 - RNA, 19 nt, Artificial Sequence
  Synthetic siNA antisense region
aguagugccaccagccuuu

SEQ ID NO: 1880 - RNA, 19 nt, Artificial Sequence
  Synthetic siNA antisense region
agcucuugagagcaucuca

SEQ ID NO: 1881 - RNA, 19 nt, Artificial Sequence
  Synthetic siNA antisense region
aacuggcacuuucuucaaa

SEQ ID NO: 1882 - RNA, 19 nt, Artificial Sequence
  Synthetic siNA antisense region
cgugguuauauacucauca

SEQ ID NO: 1883 - RNA, 19 nt, Artificial Sequence
  Synthetic siNA antisense region
acauccuuguccaggguac

SEQ ID NO: 1884 - RNA, 19 nt, Artificial Sequence
  Synthetic siNA antisense region
cucaaguguauaaccagca

SEQ ID NO: 1885 - RNA, 19 nt, Artificial Sequence
  Synthetic siNA antisense region
aagagcagucuuagcuucc

SEQ ID NO: 1886 - RNA, 19 nt, Artificial Sequence
  Synthetic siNA antisense region
ugcagauuugcauuucuua

SEQ ID NO: 1887 - RNA, 19 nt, Artificial Sequence
  Synthetic siNA antisense region
ugaagguaguacauaaaau

SEQ ID NO: 1888 - RNA, 19 nt, Artificial Sequence
  Synthetic siNA antisense region
cuuagcauuaggugcuucu

SEQ ID NO: 1889 - RNA, 19 nt, Artificial Sequence
  Synthetic siNA antisense region
aguuccuagaaucucuucc

SEQ ID NO: 1890 - RNA, 19 nt, Artificial Sequence
  Synthetic siNA antisense region
ucucaaauuccaggauaca

SEQ ID NO: 1891 - RNA, 19 nt, Artificial Sequence
  Synthetic siNA antisense region
agcaugagcaagcauuucu

SEQ ID NO: 1892 - RNA, 19 nt, Artificial Sequence
  Synthetic siNA antisense region
uaauuuucuugucucuuca

SEQ ID NO: 1893 - RNA, 19 nt, Artificial Sequence
  Synthetic siNA antisense region
auccaugcauauaggcauu

SEQ ID NO: 1894 - RNA, 19 nt, Artificial Sequence
  Synthetic siNA antisense region
ugccauuauggcucuaaca

SEQ ID NO: 1895 - RNA, 19 nt, Artificial Sequence
  Synthetic siNA antisense region
auacuuacguuggaugguu

SEQ ID NO: 1896 - RNA, 19 nt, Artificial Sequence
  Synthetic siNA antisense region
uugaauuuuaauuccuuua

SEQ ID NO: 1897 - RNA, 19 nt, Artificial Sequence
  Synthetic siNA antisense region
auagucaacgaugcccucu

SEQ ID NO: 1898 - RNA, 19 nt, Artificial Sequence
  Synthetic siNA antisense region
aaagaagaaucggacacca

SEQ ID NO: 1899 - RNA, 19 nt, Artificial Sequence
  Synthetic siNA antisense region
aggcucuuuacuaguauaa

SEQ ID NO: 1900 - RNA, 19 nt, Artificial Sequence
  Synthetic siNA antisense region
cguaauaauagaagcuaca

SEQ ID NO: 1901 - RNA, 19 nt, Artificial Sequence
  Synthetic siNA antisense region
auuuagagaguucagcuuc

SEQ ID NO: 1902 - RNA, 19 nt, Artificial Sequence
  Synthetic siNA antisense region
cauugugacaagcggcuca

SEQ ID NO: 1903 - RNA, 19 nt, Artificial Sequence
  Synthetic siNA antisense region
ugucacauaaccaauuggc

SEQ ID NO: 1904 - RNA, 19 nt, Artificial Sequence
  Synthetic siNA antisense region
uucaagauuaaaaccaugu

SEQ ID NO: 1905 - RNA, 19 nt, Artificial Sequence
  Synthetic siNA antisense region
cauacagcgcgcagccucu

SEQ ID NO: 1906 - RNA, 19 nt, Artificial Sequence
  Synthetic siNA antisense region
aggagcuuuaagagaacgc

SEQ ID NO: 1907 - RNA, 19 nt, Artificial Sequence
  Synthetic siNA antisense region
ugauacugacacuacggca

SEQ ID NO: 1908 - RNA, 19 nt, Artificial Sequence
  Synthetic siNA antisense region
aguaacagcaucuggugau

SEQ ID NO: 1909 - RNA, 19 nt, Artificial Sequence
  Synthetic siNA antisense region
gagguauccauuauaugua

SEQ ID NO: 1910 - RNA, 19 nt, Artificial Sequence
  Synthetic siNA antisense region
ugucuuugaugacgaagug

SEQ ID NO: 1911 - RNA, 19 nt, Artificial Sequence
  Synthetic siNA antisense region
uacaaagugcuccucagau

SEQ ID NO: 1912 - RNA, 19 nt, Artificial Sequence
  Synthetic siNA antisense region
agccaaagaaacuguuucu

SEQ ID NO: 1913 - RNA, 19 nt, Artificial Sequence
  Synthetic siNA antisense region
ccaaucucuguaagagcca

SEQ ID NO: 1914 - RNA, 19 nt, Artificial Sequence
  Synthetic siNA antisense region
acgcuguccugaauaggac

SEQ ID NO: 1915 - RNA, 19 nt, Artificial Sequence
  Synthetic siNA antisense region
uucaacaccuaacucugua

SEQ ID NO: 1916 - RNA, 19 nt, Artificial Sequence
  Synthetic siNA antisense region
gucaccacgcuuaagaaau

SEQ ID NO: 1917 - RNA, 19 nt, Artificial Sequence
  Synthetic siNA antisense region
agugugguacacaauuuug

SEQ ID NO: 1918 - RNA, 19 nt, Artificial Sequence
  Synthetic siNA antisense region
cucgacggggcucuccaga

SEQ ID NO: 1919 - RNA, 19 nt, Artificial Sequence
  Synthetic siNA antisense region
cucaccgucaagaugaaac

SEQ ID NO: 1920 - RNA, 19 nt, Artificial Sequence
  Synthetic siNA antisense region
uuugucaagugaaagaacc

SEQ ID NO: 1921 - RNA, 19 nt, Artificial Sequence
  Synthetic siNA antisense region
ggauaagagacucuuuagu

SEQ ID NO: 1922 - RNA, 19 nt, Artificial Sequence
  Synthetic siNA antisense region
agucuuaaccucccgcagg

SEQ ID NO: 1923 - RNA, 19 nt, Artificial Sequence
  Synthetic siNA antisense region
aguugugaacacuuuuaua

SEQ ID NO: 1924 - RNA, 19 nt, Artificial Sequence
  Synthetic siNA antisense region
gagauuaguguuguccaca

SEQ ID NO: 1925 - RNA, 19 nt, Artificial Sequence
  Synthetic siNA antisense region
auccacaagcugugugugg

SEQ ID NO: 1926 - RNA, 19 nt, Artificial Sequence
  Synthetic siNA antisense region
uccauaugucauagacaua

SEQ ID NO: 1927 - RNA, 19 nt, Artificial Sequence
  Synthetic siNA antisense region
uguuggaccaaacugcugu

SEQ ID NO: 1928 - RNA, 19 nt, Artificial Sequence
  Synthetic siNA antisense region
aucagcaccauccaaguau

SEQ ID NO: 1929 - RNA, 19 nt, Artificial Sequence
  Synthetic siNA antisense region
agguuuaauuuuuguaaca

SEQ ID NO: 1930 - RNA, 19 nt, Artificial Sequence
  Synthetic siNA antisense region
acccucaugauuuacauga

SEQ ID NO: 1931 - RNA, 19 nt, Artificial Sequence
  Synthetic siNA antisense region
uaguacaaagaaagucuua

SEQ ID NO: 1932 - RNA, 19 nt, Artificial Sequence
  Synthetic siNA antisense region
uagugugucaucacuaggu

SEQ ID NO: 1933 - RNA, 19 nt, Artificial Sequence
  Synthetic siNA antisense region
cucgaaagcuucacuacgu

SEQ ID NO: 1934 - RNA, 19 nt, Artificial Sequence
  Synthetic siNA antisense region
aucaagaguaugguaguac

SEQ ID NO: 1935 - RNA, 19 nt, Artificial Sequence
  Synthetic siNA antisense region
ccuaccaagaaaacucuca

SEQ ID NO: 1936 - RNA, 19 nt, Artificial Sequence
  Synthetic siNA antisense region
guuuaaagcagacauguac

SEQ ID NO: 1937 - RNA, 19 nt, Artificial Sequence
  Synthetic siNA antisense region
uuuccauuucuuugugugg

SEQ ID NO: 1938 - RNA, 19 nt, Artificial Sequence
  Synthetic siNA antisense region
accaccaacuugaggaaau

SEQ ID NO: 1939 - RNA, 19 nt, Artificial Sequence
  Synthetic siNA antisense region
ccauuuaauugaaguuaaa

SEQ ID NO: 1940 - RNA, 19 nt, Artificial Sequence
  Synthetic siNA antisense region
auaacaauuguuaucagcc

SEQ ID NO: 1941 - RNA, 19 nt, Artificial Sequence
  Synthetic siNA antisense region
uaauaaaacacuagacaaa

SEQ ID NO: 1942 - RNA, 19 nt, Artificial Sequence
  Synthetic siNA antisense region
uucaagcuguugaagugcu

SEQ ID NO: 1943 - RNA, 19 nt, Artificial Sequence
  Synthetic siNA antisense region
uggugcauugaauuugacu

SEQ ID NO: 1944 - RNA, 19 nt, Artificial Sequence
  Synthetic siNA antisense region
auaagccucuugaagugcu

SEQ ID NO: 1945 - RNA, 19 nt, Artificial Sequence
  Synthetic siNA antisense region
accagcacgggcucuauaa

SEQ ID NO: 1946 - RNA, 19 nt, Artificial Sequence
  Synthetic siNA antisense region
acaaaaguuagcagcauca

SEQ ID NO: 1947 - RNA, 19 nt, Artificial Sequence
  Synthetic siNA antisense region
guaagcgaguaugagugca

SEQ ID NO: 1948 - RNA, 19 nt, Artificial Sequence
  Synthetic siNA antisense region
gccaacaguuuuauuacug

SEQ ID NO: 1949 - RNA, 19 nt, Artificial Sequence
  Synthetic siNA antisense region
ucugacaucaccaagcucg

SEQ ID NO: 1950 - RNA, 19 nt, Artificial Sequence
  Synthetic siNA antisense region
aagaugggucauaguuucu

SEQ ID NO: 1951 - RNA, 19 nt, Artificial Sequence
  Synthetic siNA antisense region
caaauuagcaugcuguaga

SEQ ID NO: 1952 - RNA, 19 nt, Artificial Sequence
  Synthetic siNA antisense region
aacucgcuuugcagauucc

SEQ ID NO: 1953 - RNA, 19 nt, Artificial Sequence
  Synthetic siNA antisense region
uuuacacaccacauuaaga

SEQ ID NO: 1954 - RNA, 19 nt, Artificial Sequence
  Synthetic siNA antisense region
aguuuucugaccacaaugu

SEQ ID NO: 1955 - RNA, 19 nt, Artificial Sequence
  Synthetic siNA antisense region
uacacccguuaagguagua

SEQ ID NO: 1956 - RNA, 19 nt, Artificial Sequence
  Synthetic siNA antisense region
cauauacaucacagcuucu

SEQ ID NO: 1957 - RNA, 19 nt, Artificial Sequence
  Synthetic siNA antisense region
aucauaagauagaguaccc

SEQ ID NO: 1958 - RNA, 19 nt, Artificial Sequence
  Synthetic siNA antisense region
aacaccugucuuaagauua

SEQ ID NO: 1959 - RNA, 19 nt, Artificial Sequence
  Synthetic siNA antisense region
acacacacauggaauggaa

SEQ ID NO: 1960 - RNA, 19 nt, Artificial Sequence
  Synthetic siNA antisense region
uuguguagcaucacgacca

SEQ ID NO: 1961 - RNA, 19 nt, Artificial Sequence
  Synthetic siNA antisense region
cucuuguuguacuagauau

SEQ ID NO: 1962 - RNA, 19 nt, Artificial Sequence
  Synthetic siNA antisense region
caucauaacaaaagaagac

SEQ ID NO: 1963 - RNA, 19 nt, Artificial Sequence
  Synthetic siNA antisense region
cucagcagguggugcagac

SEQ ID NO: 1964 - RNA, 19 nt, Artificial Sequence
  Synthetic siNA antisense region
accuugcuguaauuuauac

SEQ ID NO: 1965 - RNA, 19 nt, Artificial Sequence
  Synthetic siNA antisense region
auucgcacauaagaaugua

SEQ ID NO: 1966 - RNA, 19 nt, Artificial Sequence
  Synthetic siNA antisense region
auaguuaccaguguacuca

SEQ ID NO: 1967 - RNA, 19 nt, Artificial Sequence
  Synthetic siNA antisense region
aguguaaugaccacacuga

SEQ ID NO: 1968 - RNA, 19 nt, Artificial Sequence
  Synthetic siNA antisense region
cuccuuagcaguuauauga

SEQ ID NO: 1969 - RNA, 19 nt, Artificial Sequence
  Synthetic siNA antisense region
gucaauacgauagaggguc

SEQ ID NO: 1970 - RNA, 19 nt, Artificial Sequence
  Synthetic siNA antisense region
cuuuguaaggugagcuccg

SEQ ID NO: 1971 - RNA, 19 nt, Artificial Sequence
  Synthetic siNA antisense region
uccuuuguacucugacauc

SEQ ID NO: 1972 - RNA, 19 nt, Artificial Sequence
  Synthetic siNA antisense region
gaaaacaucagucacuggu

SEQ ID NO: 1973 - RNA, 19 nt, Artificial Sequence
  Synthetic siNA antisense region
guaagauguuuccuuguag

SEQ ID NO: 1974 - RNA, 19 nt, Artificial Sequence
  Synthetic siNA antisense region
aggcuugaugguuguagug

SEQ ID NO: 1975 - RNA, 19 nt, Artificial Sequence
  Synthetic siNA antisense region
aucgaguuuauacgacaca

SEQ ID NO: 1976 - RNA, 19 nt, Artificial Sequence
  Synthetic siNA antisense region
cucuguguaaguaacucca

SEQ ID NO: 1977 - RNA, 19 nt, Artificial Sequence
  Synthetic siNA antisense region
auccaauuuugguucaauc

SEQ ID NO: 1978 - RNA, 19 nt, Artificial Sequence
  Synthetic siNA antisense region
auccuuuuuauaauaccca

SEQ ID NO: 1979 - RNA, 19 nt, Artificial Sequence
  Synthetic siNA antisense region
cucuguauaguaagcauua

SEQ ID NO: 1980 - RNA, 19 nt, Artificial Sequence
  Synthetic siNA antisense region
uacaaggucuauaggcugc

SEQ ID NO: 1981 - RNA, 19 nt, Artificial Sequence
  Synthetic siNA antisense region
ugguaaugguugaguuggu

SEQ ID NO: 1982 - RNA, 19 nt, Artificial Sequence
  Synthetic siNA antisense region
auuaucaaaacucgcauuu

SEQ ID NO: 1983 - RNA, 19 nt, Artificial Sequence
  Synthetic siNA antisense region
agaacaugugaguuugaaa

SEQ ID NO: 1984 - RNA, 19 nt, Artificial Sequence
  Synthetic siNA antisense region
aucagcaaauuuuguguua

SEQ ID NO: 1985 - RNA, 19 nt, Artificial Sequence
  Synthetic siNA antisense region
ugucauuugauuuaaauca

SEQ ID NO: 1986 - RNA, 19 nt, Artificial Sequence
  Synthetic siNA antisense region
agcuggcuuugugaagccu

SEQ ID NO: 1987 - RNA, 19 nt, Artificial Sequence
  Synthetic siNA antisense region
gacagauagcucucgugaa

SEQ ID NO: 1988 - RNA, 19 nt, Artificial Sequence
  Synthetic siNA antisense region
caagucugggaagaaugug

SEQ ID NO: 1989 - RNA, 19 nt, Artificial Sequence
  Synthetic siNA antisense region
agccacuacaucgccauuc

SEQ ID NO: 1990 - RNA, 19 nt, Artificial Sequence
  Synthetic siNA antisense region
auagugucuauagucaaua

SEQ ID NO: 1991 - RNA, 19 nt, Artificial Sequence
  Synthetic siNA antisense region
uuucuugaaacucgcugaa

SEQ ID NO: 1992 - RNA, 19 nt, Artificial Sequence
  Synthetic siNA antisense region
augcaguaauuuagcaccu

SEQ ID NO: 1993 - RNA, 19 nt, Artificial Sequence
  Synthetic siNA antisense region
gugccaaacaauuggcuua

SEQ ID NO: 1994 - RNA, 19 nt, Artificial Sequence
  Synthetic siNA antisense region
gguuguagccugguuaaug

SEQ ID NO: 1995 - RNA, 19 nt, Artificial Sequence
  Synthetic siNA antisense region
ugguuugaacguugucuug

SEQ ID NO: 1996 - RNA, 19 nt, Artificial Sequence
  Synthetic siNA antisense region
acguaaacaccaaguguuu

SEQ ID NO: 1997 - RNA, 19 nt, Artificial Sequence
  Synthetic siNA antisense region
cuuuguacuccaaagacaa

SEQ ID NO: 1998 - RNA, 19 nt, Artificial Sequence
  Synthetic siNA antisense region
auuugaaguaucuacuggc

SEQ ID NO: 1999 - RNA, 19 nt, Artificial Sequence
  Synthetic siNA antisense region
ugccagaacuucaaaugaa

SEQ ID NO: 2000 - RNA, 19 nt, Artificial Sequence
  Synthetic siNA antisense region
uccuugugugucuucuacu

SEQ ID NO: 2001 - RNA, 19 nt, Artificial Sequence
  Synthetic siNA antisense region
acaagcaagauuguccauu

SEQ ID NO: 2002 - RNA, 19 nt, Artificial Sequence
  Synthetic siNA antisense region
gguggguuguugacuuuca

SEQ ID NO: 2003 - RNA, 19 nt, Artificial Sequence
  Synthetic siNA antisense region
uuccacuacuucuucagag

SEQ ID NO: 2004 - RNA, 19 nt, Artificial Sequence
  Synthetic siNA antisense region
cuucuguaugguaggauuu

SEQ ID NO: 2005 - RNA, 19 nt, Artificial Sequence
  Synthetic siNA antisense region
gucacacucuaugacuucc

SEQ ID NO: 2006 - RNA, 19 nt, Artificial Sequence
  Synthetic siNA antisense region
aacuucgguaguuuucacg

SEQ ID NO: 2007 - RNA, 19 nt, Artificial Sequence
  Synthetic siNA antisense region
aaguaugacauugccuaca

SEQ ID NO: 2008 - RNA, 19 nt, Artificial Sequence
  Synthetic siNA antisense region
accuucaucugaugguuua

SEQ ID NO: 2009 - RNA, 19 nt, Artificial Sequence
  Synthetic siNA antisense region
cucuuguguuacuuuaaca

SEQ ID NO: 2010 - RNA, 19 nt, Artificial Sequence
  Synthetic siNA antisense region
aagauccucaugaccuaac

SEQ ID NO: 2011 - RNA, 19 nt, Artificial Sequence
  Synthetic siNA antisense region
uuccacauaagcagccaua

SEQ ID NO: 2012 - RNA, 19 nt, Artificial Sequence
  Synthetic siNA antisense region
aaugguaaugcuuguguuu

SEQ ID NO: 2013 - RNA, 19 nt, Artificial Sequence
  Synthetic siNA antisense region
aagcucauuagguuucuua

SEQ ID NO: 2014 - RNA, 19 nt, Artificial Sequence
  Synthetic siNA antisense region
uaaaccuaaggcuagugaa

SEQ ID NO: 2015 - RNA, 19 nt, Artificial Sequence
  Synthetic siNA antisense region
augaguggcaauuguuuuu

SEQ ID NO: 2016 - RNA, 19 nt, Artificial Sequence
  Synthetic siNA antisense region
auuaauugcagcaauacca

SEQ ID NO: 2017 - RNA, 19 nt, Artificial Sequence
  Synthetic siNA antisense region
uuuacuccaaggaacacua

SEQ ID NO: 2018 - RNA, 19 nt, Artificial Sequence
  Synthetic siNA antisense region
uuugacauaagccaaaauu

SEQ ID NO: 2019 - RNA, 19 nt, Artificial Sequence
  Synthetic siNA antisense region
ugcuuguccuaagaauggu

SEQ ID NO: 2020 - RNA, 19 nt, Artificial Sequence
  Synthetic siNA antisense region
auuugauguuguaauugcu

SEQ ID NO: 2021 - RNA, 19 nt, Artificial Sequence
  Synthetic siNA antisense region
ugcuaaucucuuagcgcaa

SEQ ID NO: 2022 - RNA, 19 nt, Artificial Sequence
  Synthetic siNA antisense region
auuguuaaacacacguugu

SEQ ID NO: 2023 - RNA, 19 nt, Artificial Sequence
  Synthetic siNA antisense region
aaacacauaaggcauauaa

SEQ ID NO: 2024 - RNA, 19 nt, Artificial Sequence
  Synthetic siNA antisense region
caauuggaacaauaaugua

SEQ ID NO: 2025 - RNA, 19 nt, Artificial Sequence
  Synthetic siNA antisense region
acuuuuaguaaaaguacac

SEQ ID NO: 2026 - RNA, 19 nt, Artificial Sequence
  Synthetic siNA antisense region
ucuaauucuagaauuggua

SEQ ID NO: 2027 - RNA, 19 nt, Artificial Sequence
  Synthetic siNA antisense region
aguuguagguagugaagcu

SEQ ID NO: 2028 - RNA, 19 nt, Artificial Sequence
  Synthetic siNA antisense region
aacacuauuuuuagcaaua

SEQ ID NO: 2029 - RNA, 19 nt, Artificial Sequence
  Synthetic siNA antisense region
uaauuuagcaacacucuua

SEQ ID NO: 2030 - RNA, 19 nt, Artificial Sequence
  Synthetic siNA antisense region
aaugccggcauccaaacau

SEQ ID NO: 2031 - RNA, 19 nt, Artificial Sequence
  Synthetic siNA antisense region
gggugacuucacauaauua

SEQ ID NO: 2032 - RNA, 19 nt, Artificial Sequence
  Synthetic siNA antisense region
gaacaauuuagaaaauuug

SEQ ID NO: 2033 - RNA, 19 nt, Artificial Sequence
  Synthetic siNA antisense region
uagccacauagcgauugug

SEQ ID NO: 2034 - RNA, 19 nt, Artificial Sequence
  Synthetic siNA antisense region
gcaaauacuuaacaacaau

SEQ ID NO: 2035 - RNA, 19 nt, Artificial Sequence
  Synthetic siNA antisense region
acagauuagagaaccuaag

SEQ ID NO: 2036 - RNA, 19 nt, Artificial Sequence
  Synthetic siNA antisense region
accaaaagcagcaguuaca

SEQ ID NO: 2037 - RNA, 19 nt, Artificial Sequence
  Synthetic siNA antisense region
aaaauuagauaagaguaca

SEQ ID NO: 2038 - RNA, 19 nt, Artificial Sequence
  Synthetic siNA antisense region
acaauaagaaggagcacca

SEQ ID NO: 2039 - RNA, 19 nt, Artificial Sequence
  Synthetic siNA antisense region
caauucucuaacgccauua

SEQ ID NO: 2040 - RNA, 19 nt, Artificial Sequence
  Synthetic siNA antisense region
guuagacgaauuaagauac

SEQ ID NO: 2041 - RNA, 19 nt, Artificial Sequence
  Synthetic siNA antisense region
gaaauccauaguaguaacg

SEQ ID NO: 2042 - RNA, 19 nt, Artificial Sequence
  Synthetic siNA antisense region
aggaaaagaaccuucacag

SEQ ID NO: 2043 - RNA, 19 nt, Artificial Sequence
  Synthetic siNA antisense region
acuuaaacaaaugcugcaa

SEQ ID NO: 2044 - RNA, 19 nt, Artificial Sequence
  Synthetic siNA antisense region
aucaagggagucuaaucca

SEQ ID NO: 2045 - RNA, 19 nt, Artificial Sequence
  Synthetic siNA antisense region
uucaagagcuggauaagaa

SEQ ID NO: 2046 - RNA, 19 nt, Artificial Sequence
  Synthetic siNA antisense region
aaucgucaccugaaugguu

SEQ ID NO: 2047 - RNA, 19 nt, Artificial Sequence
  Synthetic siNA antisense region
gucuagcuuguacgaugaa

SEQ ID NO: 2048 - RNA, 19 nt, Artificial Sequence
  Synthetic siNA antisense region
cagaccuaaaauugucaag

SEQ ID NO: 2049 - RNA, 19 nt, Artificial Sequence
  Synthetic siNA antisense region
caaaacccacucagcggcc

SEQ ID NO: 2050 - RNA, 19 nt, Artificial Sequence
  Synthetic siNA antisense region
ugugaacaacauauaugcc

SEQ ID NO: 2051 - RNA, 19 nt, Artificial Sequence
  Synthetic siNA antisense region
uaauaaauaaaagaauuuu

SEQ ID NO: 2052 - RNA, 19 nt, Artificial Sequence
  Synthetic siNA antisense region
cauuauagcugaaagaccu

SEQ ID NO: 2053 - RNA, 19 nt, Artificial Sequence
  Synthetic siNA antisense region
auagccaaagaacaccugc

SEQ ID NO: 2054 - RNA, 19 nt, Artificial Sequence
  Synthetic siNA antisense region
gaugaaaugacuagcaaaa

SEQ ID NO: 2055 - RNA, 19 nt, Artificial Sequence
  Synthetic siNA antisense region
caugagccaagaauugcug

SEQ ID NO: 2056 - RNA, 19 nt, Artificial Sequence
  Synthetic siNA antisense region
aauacuaaugauaaaccac

SEQ ID NO: 2057 - RNA, 19 nt, Artificial Sequence
  Synthetic siNA antisense region
aacgggugccauuuguaca

SEQ ID NO: 2058 - RNA, 19 nt, Artificial Sequence
  Synthetic siNA antisense region
cauccuaaccauugcagaa

SEQ ID NO: 2059 - RNA, 19 nt, Artificial Sequence
  Synthetic siNA antisense region
agaagcaaagaagauguac

SEQ ID NO: 2060 - RNA, 19 nt, Artificial Sequence
  Synthetic siNA antisense region
cuuccauauguaguagaaa

SEQ ID NO: 2061 - RNA, 19 nt, Artificial Sequence
  Synthetic siNA antisense region
caugauaugaacauagcuc

SEQ ID NO: 2062 - RNA, 19 nt, Artificial Sequence
  Synthetic siNA antisense region
cgaagaggugcaaccaucc

SEQ ID NO: 2063 - RNA, 19 nt, Artificial Sequence
  Synthetic siNA antisense region
auagcacaucaugcaaguc

SEQ ID NO: 2064 - RNA, 19 nt, Artificial Sequence
  Synthetic siNA antisense region
uguggcacgauugcgcuua

SEQ ID NO: 2065 - RNA, 19 nt, Artificial Sequence
  Synthetic siNA antisense region
aguuguacacucaacgcgu

SEQ ID NO: 2066 - RNA, 19 nt, Artificial Sequence
  Synthetic siNA antisense region
cuucaugccauuaacaaua

SEQ ID NO: 2067 - RNA, 19 nt, Artificial Sequence
  Synthetic siNA antisense region
auagacauagaaagaucuc

SEQ ID NO: 2068 - RNA, 19 nt, Artificial Sequence
  Synthetic siNA antisense region
gccacggccuccauuugca

SEQ ID NO: 2069 - RNA, 19 nt, Artificial Sequence
  Synthetic siNA antisense region
auugugagucuugcagaag

SEQ ID NO: 2070 - RNA, 19 nt, Artificial Sequence
  Synthetic siNA antisense region
acaauugagacaauuccaa

SEQ ID NO: 2071 - RNA, 19 nt, Artificial Sequence
  Synthetic siNA antisense region
accagugcaaaauguguca

SEQ ID NO: 2072 - RNA, 19 nt, Artificial Sequence
  Synthetic siNA antisense region
aucacuaaugaauguacua

SEQ ID NO: 2073 - RNA, 19 nt, Artificial Sequence
  Synthetic siNA antisense region
caaaucacgagcaacuuca

SEQ ID NO: 2074 - RNA, 19 nt, Artificial Sequence
  Synthetic siNA antisense region
ucuuuuaaacuggagugac

SEQ ID NO: 2075 - RNA, 19 nt, Artificial Sequence
  Synthetic siNA antisense region
gucaguaggguugauuggu

SEQ ID NO: 2076 - RNA, 19 nt, Artificial Sequence
  Synthetic siNA antisense region
aacaauauacgaugacugg

SEQ ID NO: 2077 - RNA, 19 nt, Artificial Sequence
  Synthetic siNA antisense region
uuucacagcaacacuauca

SEQ ID NO: 2078 - RNA, 19 nt, Artificial Sequence
  Synthetic siNA antisense region
gaggugaagcgcgccauuu

SEQ ID NO: 2079 - RNA, 19 nt, Artificial Sequence
  Synthetic siNA antisense region
accagccuugucaaaguag

SEQ ID NO: 2080 - RNA, 19 nt, Artificial Sequence
  Synthetic siNA antisense region
ucucucauaggucuuuuga

SEQ ID NO: 2081 - RNA, 19 nt, Artificial Sequence
  Synthetic siNA antisense region
aaaaugggagagcggaugu

SEQ ID NO: 2082 - RNA, 19 nt, Artificial Sequence
  Synthetic siNA antisense region
caaauugucuaaauugaca

SEQ ID NO: 2083 - RNA, 19 nt, Artificial Sequence
  Synthetic siNA antisense region
uuuaguguuguuagcucuc

SEQ ID NO: 2084 - RNA, 19 nt, Artificial Sequence
  Synthetic siNA antisense region
auuaauaggcagugaaccu

SEQ ID NO: 2085 - RNA, 19 nt, Artificial Sequence
  Synthetic siNA antisense region
gccaucaaaaacuaugaca

SEQ ID NO: 2086 - RNA, 19 nt, Artificial Sequence
  Synthetic siNA antisense region
cucgucgcauuuggacuug

SEQ ID NO: 2087 - RNA, 19 nt, Artificial Sequence
  Synthetic siNA antisense region
agcagacuuagaagcagac

SEQ ID NO: 2088 - RNA, 19 nt, Artificial Sequence
  Synthetic siNA antisense region
cugacuguaguacacagaa

SEQ ID NO: 2089 - RNA, 19 nt, Artificial Sequence
  Synthetic siNA antisense region
aauagguuggcacaucagc

SEQ ID NO: 2090 - RNA, 19 nt, Artificial Sequence
  Synthetic siNA antisense region
agcuuggucaagcaacaga

SEQ ID NO: 2091 - RNA, 19 nt, Artificial Sequence
  Synthetic siNA antisense region
uccaacgucugauacaaga

SEQ ID NO: 2092 - RNA, 19 nt, Artificial Sequence
  Synthetic siNA antisense region
ggaaacuucaguacuaucu

SEQ ID NO: 2093 - RNA, 19 nt, Artificial Sequence
  Synthetic siNA antisense region
agcaucaaacaucuuaacg

SEQ ID NO: 2094 - RNA, 19 nt, Artificial Sequence
  Synthetic siNA antisense region
ugaaaaggugucgacauaa

SEQ ID NO: 2095 - RNA, 19 nt, Artificial Sequence
  Synthetic siNA antisense region
aggaacacuaaaaguugcu

SEQ ID NO: 2096 - RNA, 19 nt, Artificial Sequence
  Synthetic siNA antisense region
ugccuuaaguuuuuccaua

SEQ ID NO: 2097 - RNA, 19 nt, Artificial Sequence
  Synthetic siNA antisense region
gugagcuguagcaacaagu

SEQ ID NO: 2098 - RNA, 19 nt, Artificial Sequence
  Synthetic siNA antisense region
acccuuugcuaacucgcug

SEQ ID NO: 2099 - RNA, 19 nt, Artificial Sequence
  Synthetic siNA antisense region
gacaccaucuaaagcuaca

SEQ ID NO: 2100 - RNA, 19 nt, Artificial Sequence
  Synthetic siNA antisense region
ugacacgaauguagaaagg

SEQ ID NO: 2101 - RNA, 19 nt, Artificial Sequence
  Synthetic siNA antisense region
aacaccuugucgggcagcu

SEQ ID NO: 2102 - RNA, 19 nt, Artificial Sequence
  Synthetic siNA antisense region
gucaacaucgguaucaaca

SEQ ID NO: 2103 - RNA, 19 nt, Artificial Sequence
  Synthetic siNA antisense region
uucaauaacauccuuugug

SEQ ID NO: 2104 - RNA, 19 nt, Artificial Sequence
  Synthetic siNA antisense region
augugaaaguuugagacau

SEQ ID NO: 2105 - RNA, 19 nt, Artificial Sequence
  Synthetic siNA antisense region
cacuucuaagucagaguga

SEQ ID NO: 2106 - RNA, 19 nt, Artificial Sequence
  Synthetic siNA antisense region
guuacaacugucaccuguc

SEQ ID NO: 2107 - RNA, 19 nt, Artificial Sequence
  Synthetic siNA antisense region
auaggugagcaugaaauug

SEQ ID NO: 2108 - RNA, 19 nt, Artificial Sequence
  Synthetic siNA antisense region
cauguuuucaaccuuauua

SEQ ID NO: 2109 - RNA, 19 nt, Artificial Sequence
  Synthetic siNA antisense region
gccaagaucucugggcguc

SEQ ID NO: 2110 - RNA, 19 nt, Artificial Sequence
  Synthetic siNA antisense region
auuacagucaauacaugcg

SEQ ID NO: 2111 - RNA, 19 nt, Artificial Sequence
  Synthetic siNA antisense region
ggcauugauaugccuugca

SEQ ID NO: 2112 - RNA, 19 nt, Artificial Sequence
  Synthetic siNA antisense region
gugacuuuuugcuacuugg

SEQ ID NO: 2113 - RNA, 19 nt, Artificial Sequence
  Synthetic siNA antisense region
ccagaugagugaaacauug

SEQ ID NO: 2114 - RNA, 19 nt, Artificial Sequence
  Synthetic siNA antisense region
cauguagucuuuuacauuc

SEQ ID NO: 2115 - RNA, 19 nt, Artificial Sequence
  Synthetic siNA antisense region
cagcuguucagauaaagac

SEQ ID NO: 2116 - RNA, 19 nt, Artificial Sequence
  Synthetic siNA antisense region
acuacgaauuuguuuacgc

SEQ ID NO: 2117 - RNA, 19 nt, Artificial Sequence
  Synthetic siNA antisense region
guuguucuucuuggcagca

SEQ ID NO: 2118 - RNA, 19 nt, Artificial Sequence
  Synthetic siNA antisense region
aguuagucuaaaagguaug

SEQ ID NO: 2119 - RNA, 19 nt, Artificial Sequence
  Synthetic siNA antisense region
cugucuaguuguagcacaa

SEQ ID NO: 2120 - RNA, 19 nt, Artificial Sequence
  Synthetic siNA antisense region
aguuaugacauugacaacc

SEQ ID NO: 2121 - RNA, 19 nt, Artificial Sequence
  Synthetic siNA antisense region
cuugagugagauuuuagua

SEQ ID NO: 2122 - RNA, 19 nt, Artificial Sequence
  Synthetic siNA antisense region
acuaacaaucuuaccaccc

SEQ ID NO: 2123 - RNA, 19 nt, Artificial Sequence
  Synthetic siNA antisense region
cauaaguuuaaaacaagua

SEQ ID NO: 2124 - RNA, 19 nt, Artificial Sequence
  Synthetic siNA antisense region
caauaauguggccuuaagc

SEQ ID NO: 2125 - RNA, 19 nt, Artificial Sequence
  Synthetic siNA antisense region
caaugcagcaagaacgcac

SEQ ID NO: 2126 - RNA, 19 nt, Artificial Sequence
  Synthetic siNA antisense region
cauaacgauauaacaaacc

SEQ ID NO: 2127 - RNA, 19 nt, Artificial Sequence
  Synthetic siNA antisense region
ugacaauguauguacuggc

SEQ ID NO: 2128 - RNA, 19 nt, Artificial Sequence
  Synthetic siNA antisense region
uguguaaccaucauggauu

SEQ ID NO: 2129 - RNA, 19 nt, Artificial Sequence
  Synthetic siNA antisense region
guaaccaaugauuucauuu

SEQ ID NO: 2130 - RNA, 19 nt, Artificial Sequence
  Synthetic siNA antisense region
accauccugaauggcuuug

SEQ ID NO: 2131 - RNA, 19 nt, Artificial Sequence
  Synthetic siNA antisense region
aaugaugucacgagugaca

SEQ ID NO: 2132 - RNA, 19 nt, Artificial Sequence
  Synthetic siNA antisense region
aaaacaaucaucaguagaa

SEQ ID NO: 2133 - RNA, 19 nt, Artificial Sequence
  Synthetic siNA antisense region
accagcauguuuauuugca

SEQ ID NO: 2134 - RNA, 19 nt, Artificial Sequence
  Synthetic siNA antisense region
gcuaaaccaugcgucaaaa

SEQ ID NO: 2135 - RNA, 19 nt, Artificial Sequence
  Synthetic siNA antisense region
guaugaaccaccacgcugg

SEQ ID NO: 2136 - RNA, 19 nt, Artificial Sequence
  Synthetic siNA antisense region
gcagcuuuugucauuuuug

SEQ ID NO: 2137 - RNA, 19 nt, Artificial Sequence
  Synthetic siNA antisense region
gauagcagcuacuacaggg

SEQ ID NO: 2138 - RNA, 19 nt, Artificial Sequence
  Synthetic siNA antisense region
accaaucucucuuguaaug

SEQ ID NO: 2139 - RNA, 19 nt, Artificial Sequence
  Synthetic siNA antisense region
uaagccaggcacuaugaaa

SEQ ID NO: 2140 - RNA, 19 nt, Artificial Sequence
  Synthetic siNA antisense region
ucucagcacaguacccggu

SEQ ID NO: 2141 - RNA, 19 nt, Artificial Sequence
  Synthetic siNA antisense region
gaagucaccauugauugcu

SEQ ID NO: 2142 - RNA, 19 nt, Artificial Sequence
  Synthetic siNA antisense region
acgagguagaaaaugcaag

SEQ ID NO: 2143 - RNA, 19 nt, Artificial Sequence
  Synthetic siNA antisense region
gccaacagcacuaaaaaca

SEQ ID NO: 2144 - RNA, 19 nt, Artificial Sequence
  Synthetic siNA antisense region
agguguguagcaaauguug

SEQ ID NO: 2145 - RNA, 19 nt, Artificial Sequence
  Synthetic siNA antisense region
auacucaaugaguuuggaa

SEQ ID NO: 2146 - RNA, 19 nt, Artificial Sequence
  Synthetic siNA antisense region
agagguagcaaaaucacua

SEQ ID NO: 2147 - RNA, 19 nt, Artificial Sequence
  Synthetic siNA antisense region
agcagcaagaacgcaagca

SEQ ID NO: 2148 - RNA, 19 nt, Artificial Sequence
  Synthetic siNA antisense region
cuuaaaaauuguacacuca

SEQ ID NO: 2149 - RNA, 19 nt, Artificial Sequence
  Synthetic siNA antisense region
agguuugcccauagcaucc

SEQ ID NO: 2150 - RNA, 19 nt, Artificial Sequence
  Synthetic siNA antisense region
gucauaacaauauggcaca

SEQ ID NO: 2151 - RNA, 19 nt, Artificial Sequence
  Synthetic siNA antisense region
acccucuagcaaauuagug

SEQ ID NO: 2152 - RNA, 19 nt, Artificial Sequence
  Synthetic siNA antisense region
cucacuauaagaaauagaa

SEQ ID NO: 2153 - RNA, 19 nt, Artificial Sequence
  Synthetic siNA antisense region
acgagugucuggacgaagc

SEQ ID NO: 2154 - RNA, 19 nt, Artificial Sequence
  Synthetic siNA antisense region
accauccauaagcacauaa

SEQ ID NO: 2155 - RNA, 19 nt, Artificial Sequence
  Synthetic siNA antisense region
aggaaacuguaugauggaa

SEQ ID NO: 2156 - RNA, 19 nt, Artificial Sequence
  Synthetic siNA antisense region
acccuccagguaaguguua

SEQ ID NO: 2157 - RNA, 19 nt, Artificial Sequence
  Synthetic siNA antisense region
uguuacuacucuaacagaa

SEQ ID NO: 2158 - RNA, 19 nt, Artificial Sequence
  Synthetic siNA antisense region
guacucagcaucaaaaguu

SEQ ID NO: 2159 - RNA, 19 nt, Artificial Sequence
  Synthetic siNA antisense region
gcauguaccaugucuacag

SEQ ID NO: 2160 - RNA, 19 nt, Artificial Sequence
  Synthetic siNA antisense region
accuacuucugaccuuucg

SEQ ID NO: 2161 - RNA, 19 nt, Artificial Sequence
  Synthetic siNA antisense region
acugguagauaggcaaaua

SEQ ID NO: 2162 - RNA, 19 nt, Artificial Sequence
  Synthetic siNA antisense region
auuaagaacccaucuacca

SEQ ID NO: 2163 - RNA, 19 nt, Artificial Sequence
  Synthetic siNA antisense region
agcucuguaaugcucauua

SEQ ID NO: 2164 - RNA, 19 nt, Artificial Sequence
  Synthetic siNA antisense region
acagaaaacuccugauaga

SEQ ID NO: 2165 - RNA, 19 nt, Artificial Sequence
  Synthetic siNA antisense region
auucaucgcaucaacacca

SEQ ID NO: 2166 - RNA, 19 nt, Artificial Sequence
  Synthetic siNA antisense region
aaagauguuagcuaugaga

SEQ ID NO: 2167 - RNA, 19 nt, Artificial Sequence
  Synthetic siNA antisense region
agguugcacaagaggagua

SEQ ID NO: 2168 - RNA, 19 nt, Artificial Sequence
  Synthetic siNA antisense region
cacaucuaaagcacccaca

SEQ ID NO: 2169 - RNA, 19 nt, Artificial Sequence
  Synthetic siNA antisense region
agccacuacugaagcagac

SEQ ID NO: 2170 - RNA, 19 nt, Artificial Sequence
  Synthetic siNA antisense region
uauggcaauaauaccacca

SEQ ID NO: 2171 - RNA, 19 nt, Artificial Sequence
  Synthetic siNA antisense region
ggcagcacaagucaccaau

SEQ ID NO: 2172 - RNA, 19 nt, Artificial Sequence
  Synthetic siNA antisense region
gaauuucauaaaguaguag

SEQ ID NO: 2173 - RNA, 19 nt, Artificial Sequence
  Synthetic siNA antisense region
cucaccaaaaacacgucug

SEQ ID NO: 2174 - RNA, 19 nt, Artificial Sequence
  Synthetic siNA antisense region
agcaacaacaugguuguac

SEQ ID NO: 2175 - RNA, 19 nt, Artificial Sequence
  Synthetic siNA antisense region
aaacaaaagugcauuagca

SEQ ID NO: 2176 - RNA, 19 nt, Artificial Sequence
  Synthetic siNA antisense region
uauagugaaagacaucaaa

SEQ ID NO: 2177 - RNA, 19 nt, Artificial Sequence
  Synthetic siNA antisense region
agcugguaccagacagagu

SEQ ID NO: 2178 - RNA, 19 nt, Artificial Sequence
  Synthetic siNA antisense region
ucccggcagaaagcuguaa

SEQ ID NO: 2179 - RNA, 19 nt, Artificial Sequence
  Synthetic siNA antisense region
guaaaagacugaguagacu

SEQ ID NO: 2180 - RNA, 19 nt, Artificial Sequence
  Synthetic siNA antisense region
auagaaugucaaguacaag

SEQ ID NO: 2181 - RNA, 19 nt, Artificial Sequence
  Synthetic siNA antisense region
ugaaacaucauuggugaaa

SEQ ID NO: 2182 - RNA, 19 nt, Artificial Sequence
  Synthetic siNA antisense region
uugaaggugagccaagaau

SEQ ID NO: 2183 - RNA, 19 nt, Artificial Sequence
  Synthetic siNA antisense region
agaaaacauggcaaaccau

SEQ ID NO: 2184 - RNA, 19 nt, Artificial Sequence
  Synthetic siNA antisense region
ccaaaaaggcacaauagga

SEQ ID NO: 2185 - RNA, 19 nt, Artificial Sequence
  Synthetic siNA antisense region
uacauagauugcuguuauc

SEQ ID NO: 2186 - RNA, 19 nt, Artificial Sequence
  Synthetic siNA antisense region
cuucagagaaauacagaau

SEQ ID NO: 2187 - RNA, 19 nt, Artificial Sequence
  Synthetic siNA antisense region
aaagaaccaauggcagugc

SEQ ID NO: 2188 - RNA, 19 nt, Artificial Sequence
  Synthetic siNA antisense region
uuuccuaagauaguuguua

SEQ ID NO: 2189 - RNA, 19 nt, Artificial Sequence
  Synthetic siNA antisense region
uccauuaaacaugacucuu

SEQ ID NO: 2190 - RNA, 19 nt, Artificial Sequence
  Synthetic siNA antisense region
gaagguacuaaauguaacu

SEQ ID NO: 2191 - RNA, 19 nt, Artificial Sequence
  Synthetic siNA antisense region
acacaaagcagccuccucg

SEQ ID NO: 2192 - RNA, 19 nt, Artificial Sequence
  Synthetic siNA antisense region
cuuguugagcaaaaaggua

SEQ ID NO: 2193 - RNA, 19 nt, Artificial Sequence
  Synthetic siNA antisense region
caauuuuagguacauuucc

SEQ ID NO: 2194 - RNA, 19 nt, Artificial Sequence
  Synthetic siNA antisense region
caacagugucucgcuacgc

SEQ ID NO: 2195 - RNA, 19 nt, Artificial Sequence
  Synthetic siNA antisense region
guuauacuguguaaguggc

SEQ ID NO: 2196 - RNA, 19 nt, Artificial Sequence
  Synthetic siNA antisense region
auauagagcaagauaccug

SEQ ID NO: 2197 - RNA, 19 nt, Artificial Sequence
  Synthetic siNA antisense region
gaaauacuuguacuuguua

SEQ ID NO: 2198 - RNA, 19 nt, Artificial Sequence
  Synthetic siNA antisense region
aguaucuaaggcuccacug

SEQ ID NO: 2199 - RNA, 19 nt, Artificial Sequence
  Synthetic siNA antisense region
ugcuucacgauagcuggua

SEQ ID NO: 2200 - RNA, 19 nt, Artificial Sequence
  Synthetic siNA antisense region
ugcuaaguggcagcaagcu

SEQ ID NO: 2201 - RNA, 19 nt, Artificial Sequence
  Synthetic siNA antisense region
aaagucauuuagagccuuu

SEQ ID NO: 2202 - RNA, 19 nt, Artificial Sequence
  Synthetic siNA antisense region
aucagcaccugaguugcua

SEQ ID NO: 2203 - RNA, 19 nt, Artificial Sequence
  Synthetic siNA antisense region
uggugguugguagagaaca

SEQ ID NO: 2204 - RNA, 19 nt, Artificial Sequence
  Synthetic siNA antisense region
agaagugauugaugucugu

SEQ ID NO: 2205 - RNA, 19 nt, Artificial Sequence
  Synthetic siNA antisense region
accacucugcagaacagca

SEQ ID NO: 2206 - RNA, 19 nt, Artificial Sequence
  Synthetic siNA antisense region
gaaugccauuuuccuaaaa

SEQ ID NO: 2207 - RNA, 19 nt, Artificial Sequence
  Synthetic siNA antisense region
uucaacuuugccugacggg

SEQ ID NO: 2208 - RNA, 19 nt, Artificial Sequence
  Synthetic siNA antisense region
uacuuguaccaugcacccu

SEQ ID NO: 2209 - RNA, 19 nt, Artificial Sequence
  Synthetic siNA antisense region
aguuguaguuccacagguu

SEQ ID NO: 2210 - RNA, 19 nt, Artificial Sequence
  Synthetic siNA antisense region
caaccacaauccauuaaga

SEQ ID NO: 2211 - RNA, 19 nt, Artificial Sequence
  Synthetic siNA antisense region
acaguauacugugucaucc

SEQ ID NO: 2212 - RNA, 19 nt, Artificial Sequence
  Synthetic siNA antisense region
gcaaaugacaugucuugga

SEQ ID NO: 2213 - RNA, 19 nt, Artificial Sequence
  Synthetic siNA antisense region
aagcaugucuucugcugug

SEQ ID NO: 2214 - RNA, 19 nt, Artificial Sequence
  Synthetic siNA antisense region
aucuucauaguuaggauua

SEQ ID NO: 2215 - RNA, 19 nt, Artificial Sequence
  Synthetic siNA antisense region
ggauuugcgaaugagcaga

SEQ ID NO: 2216 - RNA, 19 nt, Artificial Sequence
  Synthetic siNA antisense region
aacaagaaagcuaugguug

SEQ ID NO: 2217 - RNA, 19 nt, Artificial Sequence
  Synthetic siNA antisense region
uugaacauugccagccuga

SEQ ID NO: 2218 - RNA, 19 nt, Artificial Sequence
  Synthetic siNA antisense region
auggccaauaacacgaagu

SEQ ID NO: 2219 - RNA, 19 nt, Artificial Sequence
  Synthetic siNA antisense region
cagacaauuuugcauagaa

SEQ ID NO: 2220 - RNA, 19 nt, Artificial Sequence
  Synthetic siNA antisense region
aucaacuuuaagccuaagc

SEQ ID NO: 2221 - RNA, 19 nt, Artificial Sequence
  Synthetic siNA antisense region
ugucuuaggguuagaagua

SEQ ID NO: 2222 - RNA, 19 nt, Artificial Sequence
  Synthetic siNA antisense region
gacaaauuuauacuugggu

SEQ ID NO: 2223 - RNA, 19 nt, Artificial Sequence
  Synthetic siNA antisense region
uugaccagguuggauacgg

SEQ ID NO: 2224 - RNA, 19 nt, Artificial Sequence
  Synthetic siNA antisense region
ugcuagaacugaaaauguu

SEQ ID NO: 2225 - RNA, 19 nt, Artificial Sequence
  Synthetic siNA antisense region
uggugaaccauuguagcau

SEQ ID NO: 2226 - RNA, 19 nt, Artificial Sequence
  Synthetic siNA antisense region
acacugauaaacaccagau

SEQ ID NO: 2227 - RNA, 19 nt, Artificial Sequence
  Synthetic siNA antisense region
augauuaggucucauggca

SEQ ID NO: 2228 - RNA, 19 nt, Artificial Sequence
  Synthetic siNA antisense region
gaaagaaccuuuaauggua

SEQ ID NO: 2229 - RNA, 19 nt, Artificial Sequence
  Synthetic siNA antisense region
accacaugauccauuaagg

SEQ ID NO: 2230 - RNA, 19 nt, Artificial Sequence
  Synthetic siNA antisense region
aauguuaaaaccaacacua

SEQ ID NO: 2231 - RNA, 19 nt, Artificial Sequence
  Synthetic siNA antisense region
agacacgcaaucauaauca

SEQ ID NO: 2232 - RNA, 19 nt, Artificial Sequence
  Synthetic siNA antisense region
augaugcauauagcagaaa

SEQ ID NO: 2233 - RNA, 19 nt, Artificial Sequence
  Synthetic siNA antisense region
uccuguuggaagcuccaua

SEQ ID NO: 2234 - RNA, 19 nt, Artificial Sequence
  Synthetic siNA antisense region
gucaguaccagcguguacu

SEQ ID NO: 2235 - RNA, 19 nt, Artificial Sequence
  Synthetic siNA antisense region
auagaauuuaccuucuaag

SEQ ID NO: 2236 - RNA, 19 nt, Artificial Sequence
  Synthetic siNA antisense region
ucugucaacaaauggacca

SEQ ID NO: 2237 - RNA, 19 nt, Artificial Sequence
  Synthetic siNA antisense region
ugcagccugugcaguuugu

SEQ ID NO: 2238 - RNA, 19 nt, Artificial Sequence
  Synthetic siNA antisense region
uaugguugugucuguaccu

SEQ ID NO: 2239 - RNA, 19 nt, Artificial Sequence
  Synthetic siNA antisense region
ugccaaaacauuuaauguu

SEQ ID NO: 2240 - RNA, 19 nt, Artificial Sequence
  Synthetic siNA antisense region
aacagcagcauacagccau

SEQ ID NO: 2241 - RNA, 19 nt, Artificial Sequence
  Synthetic siNA antisense region
ccaccuaucaccauugaua

SEQ ID NO: 2242 - RNA, 19 nt, Artificial Sequence
  Synthetic siNA antisense region
ggugaaucuauuaagaaac

SEQ ID NO: 2243 - RNA, 19 nt, Artificial Sequence
  Synthetic siNA antisense region
aaagucauucaaaguagug

SEQ ID NO: 2244 - RNA, 19 nt, Artificial Sequence
  Synthetic siNA antisense region
cuucauugccacaagguua

SEQ ID NO: 2245 - RNA, 19 nt, Artificial Sequence
  Synthetic siNA antisense region
caaagguucauaguuguac

SEQ ID NO: 2246 - RNA, 19 nt, Artificial Sequence
  Synthetic siNA antisense region
gucaacaugaucuuguguc

SEQ ID NO: 2247 - RNA, 19 nt, Artificial Sequence
  Synthetic siNA antisense region
agaaagaggucccaauaug

SEQ ID NO: 2248 - RNA, 19 nt, Artificial Sequence
  Synthetic siNA antisense region
ggcaauuccuguuugagca

SEQ ID NO: 2249 - RNA, 19 nt, Artificial Sequence
  Synthetic siNA antisense region
agcacacauaucuaagacg

SEQ ID NO: 2250 - RNA, 19 nt, Artificial Sequence
  Synthetic siNA antisense region
cagcagcucuuucaaagca

SEQ ID NO: 2251 - RNA, 19 nt, Artificial Sequence
  Synthetic siNA antisense region
accauucauaccauucugc

SEQ ID NO: 2252 - RNA, 19 nt, Artificial Sequence
  Synthetic siNA antisense region
gcuaccaaggauaguacga

SEQ ID NO: 2253 - RNA, 19 nt, Artificial Sequence
  Synthetic siNA antisense region
cucaucuucuaaaauagug

SEQ ID NO: 2254 - RNA, 19 nt, Artificial Sequence
  Synthetic siNA antisense region
aacaucaaaugguguaaac

SEQ ID NO: 2255 - RNA, 19 nt, Artificial Sequence
  Synthetic siNA antisense region
accagagcauugucuaaca

SEQ ID NO: 2256 - RNA, 19 nt, Artificial Sequence
  Synthetic siNA antisense region
cuuaccuuggaagguaaca

SEQ ID NO: 2257 - RNA, 19 nt, Artificial Sequence
  Synthetic siNA antisense region
cuuaacaauuuucuugaac

SEQ ID NO: 2258 - RNA, 19 nt, Artificial Sequence
  Synthetic siNA antisense region
cauccaaugaugagugccc

SEQ ID NO: 2259 - RNA, 19 nt, Artificial Sequence
  Synthetic siNA antisense region
ugucaagaaaguuaaaagc

SEQ ID NO: 2260 - RNA, 19 nt, Artificial Sequence
  Synthetic siNA antisense region
aacaagaaucaauagugau

SEQ ID NO: 2261 - RNA, 19 nt, Artificial Sequence
  Synthetic siNA antisense region
ugaccacuguguacuuuga

SEQ ID NO: 2262 - RNA, 19 nt, Artificial Sequence
  Synthetic siNA antisense region
guaaacaaagaaaaacagu

SEQ ID NO: 2263 - RNA, 19 nt, Artificial Sequence
  Synthetic siNA antisense region
uggcaagaaagcauucucg

SEQ ID NO: 2264 - RNA, 19 nt, Artificial Sequence
  Synthetic siNA antisense region
cauaauaccaagaguaaau

SEQ ID NO: 2265 - RNA, 19 nt, Artificial Sequence
  Synthetic siNA antisense region
agcacaugcagcaauugcc

SEQ ID NO: 2266 - RNA, 19 nt, Artificial Sequence
  Synthetic siNA antisense region
augcuuaacaagcagcaua

SEQ ID NO: 2267 - RNA, 19 nt, Artificial Sequence
  Synthetic siNA antisense region
gcacaagaaugcgugcuua

SEQ ID NO: 2268 - RNA, 19 nt, Artificial Sequence
  Synthetic siNA antisense region
agaagguaacagaaacaag

SEQ ID NO: 2269 - RNA, 19 nt, Artificial Sequence
  Synthetic siNA antisense region
guaagcaacuguugcaaga

SEQ ID NO: 2270 - RNA, 19 nt, Artificial Sequence
  Synthetic siNA antisense region
cauguagaccauauuaaag

SEQ ID NO: 2271 - RNA, 19 nt, Artificial Sequence
  Synthetic siNA antisense region
caucacccagcuagcaggc

SEQ ID NO: 2272 - RNA, 19 nt, Artificial Sequence
  Synthetic siNA antisense region
aagccaugucaugauacgc

SEQ ID NO: 2273 - RNA, 19 nt, Artificial Sequence
  Synthetic siNA antisense region
gcuagugucagccaauuca

SEQ ID NO: 2274 - RNA, 19 nt, Artificial Sequence
  Synthetic siNA antisense region
aagccuauaaccagacaag

SEQ ID NO: 2275 - RNA, 19 nt, Artificial Sequence
  Synthetic siNA antisense region
auacauaacacaauccuua

SEQ ID NO: 2276 - RNA, 19 nt, Artificial Sequence
  Synthetic siNA antisense region
caaaacuaaagcugaagca

SEQ ID NO: 2277 - RNA, 19 nt, Artificial Sequence
  Synthetic siNA antisense region
agcugucaugagaauaagc

SEQ ID NO: 2278 - RNA, 19 nt, Artificial Sequence
  Synthetic siNA antisense region
aucaucauaaacagugcga

SEQ ID NO: 2279 - RNA, 19 nt, Artificial Sequence
  Synthetic siNA antisense region
ccaaacacgucuagcagca

SEQ ID NO: 2280 - RNA, 19 nt, Artificial Sequence
  Synthetic siNA antisense region
aaugacauucaucaguguc

SEQ ID NO: 2281 - RNA, 19 nt, Artificial Sequence
  Synthetic siNA antisense region
gacuuuguaaacaagugua

SEQ ID NO: 2282 - RNA, 19 nt, Artificial Sequence
  Synthetic siNA antisense region
uaaagcauuaccauaguag

SEQ ID NO: 2283 - RNA, 19 nt, Artificial Sequence
  Synthetic siNA antisense region
cauggaaauagcuugaucu

SEQ ID NO: 2284 - RNA, 19 nt, Artificial Sequence
  Synthetic siNA antisense region
agaaauaacuaaggcccac

SEQ ID NO: 2285 - RNA, 19 nt, Artificial Sequence
  Synthetic siNA antisense region
agaauaguuagagguuaca

SEQ ID NO: 2286 - RNA, 19 nt, Artificial Sequence
  Synthetic siNA antisense region
gauagucguaacgacacca

SEQ ID NO: 2287 - RNA, 19 nt, Artificial Sequence
  Synthetic siNA antisense region
agcucuagcuaaaaacaug

SEQ ID NO: 2288 - RNA, 19 nt, Artificial Sequence
  Synthetic siNA antisense region
aacacacacaaacacuaua

SEQ ID NO: 2289 - RNA, 19 nt, Artificial Sequence
  Synthetic siNA antisense region
uaacaauggguaauacuca

SEQ ID NO: 2290 - RNA, 19 nt, Artificial Sequence
  Synthetic siNA antisense region
gguguugccaguaauaaau

SEQ ID NO: 2291 - RNA, 19 nt, Artificial Sequence
  Synthetic siNA antisense region
aagcaugauacacuguaag

SEQ ID NO: 2292 - RNA, 19 nt, Artificial Sequence
  Synthetic siNA antisense region
gccuaagaaacaauaaaca

SEQ ID NO: 2293 - RNA, 19 nt, Artificial Sequence
  Synthetic siNA antisense region
guagcagcagcaacaauag

SEQ ID NO: 2294 - RNA, 19 nt, Artificial Sequence
  Synthetic siNA antisense region
uaaacagaaaaggccaaag

SEQ ID NO: 2295 - RNA, 19 nt, Artificial Sequence
  Synthetic siNA antisense region
ccugaaguaacgguugagu

SEQ ID NO: 2296 - RNA, 19 nt, Artificial Sequence
  Synthetic siNA antisense region
auaaacaccaagaguaagc

SEQ ID NO: 2297 - RNA, 19 nt, Artificial Sequence
  Synthetic siNA antisense region
uguagagaccaaguaguca

SEQ ID NO: 2298 - RNA, 19 nt, Artificial Sequence
  Synthetic siNA antisense region
cauauaccuaaauucuugu

SEQ ID NO: 2299 - RNA, 19 nt, Artificial Sequence
  Synthetic siNA antisense region
caaaagccccugggaguuc

SEQ ID NO: 2300 - RNA, 19 nt, Artificial Sequence
  Synthetic siNA antisense region
aauacuacucuuaggaggc

SEQ ID NO: 2301 - RNA, 19 nt, Artificial Sequence
  Synthetic siNA antisense region
guuaagcuugaaagcauca

SEQ ID NO: 2302 - RNA, 19 nt, Artificial Sequence
  Synthetic siNA antisense region
aauacccaacaacuuaaug

SEQ ID NO: 2303 - RNA, 19 nt, Artificial Sequence
  Synthetic siNA antisense region
gauacaugguuuaccucca

SEQ ID NO: 2304 - RNA, 19 nt, Artificial Sequence
  Synthetic siNA antisense region
cuguacaguagcaaccuug

SEQ ID NO: 2305 - RNA, 19 nt, Artificial Sequence
  Synthetic siNA antisense region
uacgucagacauuuuagac

SEQ ID NO: 2306 - RNA, 19 nt, Artificial Sequence
  Synthetic siNA antisense region
uaccacagaugugcacuuu

SEQ ID NO: 2307 - RNA, 19 nt, Artificial Sequence
  Synthetic siNA antisense region
uugaagaaccgagagcagu

SEQ ID NO: 2308 - RNA, 19 nt, Artificial Sequence
  Synthetic siNA antisense region
ugacucuacucuaaguugu

SEQ ID NO: 2309 - RNA, 19 nt, Artificial Sequence
  Synthetic siNA antisense region
ugcccacaauuuagaagau

SEQ ID NO: 2310 - RNA, 19 nt, Artificial Sequence
  Synthetic siNA antisense region
guggaguuguacacauugu

SEQ ID NO: 2311 - RNA, 19 nt, Artificial Sequence
  Synthetic siNA antisense region
ugcaagaagaauaucauug

SEQ ID NO: 2312 - RNA, 19 nt, Artificial Sequence
  Synthetic siNA antisense region
agcuucaguugugucuuuu

SEQ ID NO: 2313 - RNA, 19 nt, Artificial Sequence
  Synthetic siNA antisense region
agaaaccaucuucucgaaa

SEQ ID NO: 2314 - RNA, 19 nt, Artificial Sequence
  Synthetic siNA antisense region
uagcaaaacagacaaaaga

SEQ ID NO: 2315 - RNA, 19 nt, Artificial Sequence
  Synthetic siNA antisense region
uacagcacccugcauggau

SEQ ID NO: 2316 - RNA, 19 nt, Artificial Sequence
  Synthetic siNA antisense region
gcacaaccuauuaaugucu

SEQ ID NO: 2317 - RNA, 19 nt, Artificial Sequence
  Synthetic siNA antisense region
guuaucgagcauuuccucg

SEQ ID NO: 2318 - RNA, 19 nt, Artificial Sequence
  Synthetic siNA antisense region
agccugaagaguagcacgg

SEQ ID NO: 2319 - RNA, 19 nt, Artificial Sequence
  Synthetic siNA antisense region
acuaaauucugaagcaaua

SEQ ID NO: 2320 - RNA, 19 nt, Artificial Sequence
  Synthetic siNA antisense region
ggcauaugaugguaaagaa

SEQ ID NO: 2321 - RNA, 19 nt, Artificial Sequence
  Synthetic siNA antisense region
cugggcaguggcauaagcg

SEQ ID NO: 2322 - RNA, 19 nt, Artificial Sequence
  Synthetic siNA antisense region
agccugcucauaggccucc

SEQ ID NO: 2323 - RNA, 19 nt, Artificial Sequence
  Synthetic siNA antisense region
agaaucaccauuagcuaca

SEQ ID NO: 2324 - RNA, 19 nt, Artificial Sequence
  Synthetic siNA antisense region
cuuuuugagaacgacuuca

SEQ ID NO: 2325 - RNA, 19 nt, Artificial Sequence
  Synthetic siNA antisense region
auucaaagauuucuuuaac

SEQ ID NO: 2326 - RNA, 19 nt, Artificial Sequence
  Synthetic siNA antisense region
aaacucagauuuagccaca

SEQ ID NO: 2327 - RNA, 19 nt, Artificial Sequence
  Synthetic siNA antisense region
cauggcagcaucacgguca

SEQ ID NO: 2328 - RNA, 19 nt, Artificial Sequence
  Synthetic siNA antisense region
cuuuuccaacuugcguugc

SEQ ID NO: 2329 - RNA, 19 nt, Artificial Sequence
  Synthetic siNA antisense region
cauagccugaucugccauc

SEQ ID NO: 2330 - RNA, 19 nt, Artificial Sequence
  Synthetic siNA antisense region
cuguuuguacauuuggguc

SEQ ID NO: 2331 - RNA, 19 nt, Artificial Sequence
  Synthetic siNA antisense region
cuuguccucagaucuugcc

SEQ ID NO: 2332 - RNA, 19 nt, Artificial Sequence
  Synthetic siNA antisense region
acuaguuacuuuugcccuc

SEQ ID NO: 2333 - RNA, 19 nt, Artificial Sequence
  Synthetic siNA antisense region
gagcauuguuugcauagca

SEQ ID NO: 2334 - RNA, 19 nt, Artificial Sequence
  Synthetic siNA antisense region
cuuccuaagcauagugaag

SEQ ID NO: 2335 - RNA, 19 nt, Artificial Sequence
  Synthetic siNA antisense region
aagugcaucauuaucaagc

SEQ ID NO: 2336 - RNA, 19 nt, Artificial Sequence
  Synthetic siNA antisense region
auuguugauaauguuguua

SEQ ID NO: 2337 - RNA, 19 nt, Artificial Sequence
  Synthetic siNA antisense region
aacacaaccaucacgcgca

SEQ ID NO: 2338 - RNA, 19 nt, Artificial Sequence
  Synthetic siNA antisense region
ugguaugauguugagugga

SEQ ID NO: 2339 - RNA, 19 nt, Artificial Sequence
  Synthetic siNA antisense region
uuuggcugcuguagucaau

SEQ ID NO: 2340 - RNA, 19 nt, Artificial Sequence
  Synthetic siNA antisense region
agggacaacaaccaugagu

SEQ ID NO: 2341 - RNA, 19 nt, Artificial Sequence
  Synthetic siNA antisense region
cuuguagguaccauaauca

SEQ ID NO: 2342 - RNA, 19 nt, Artificial Sequence
  Synthetic siNA antisense region
guuaccaucacaaguguuc

SEQ ID NO: 2343 - RNA, 19 nt, Artificial Sequence
  Synthetic siNA antisense region
agaugcauauguaaaggug

SEQ ID NO: 2344 - RNA, 19 nt, Artificial Sequence
  Synthetic siNA antisense region
cuggauuucccagagugca

SEQ ID NO: 2345 - RNA, 19 nt, Artificial Sequence
  Synthetic siNA antisense region
auccgcaucaacaacuugc

SEQ ID NO: 2346 - RNA, 19 nt, Artificial Sequence
  Synthetic siNA antisense region
aaguugaacaaucuugcua

SEQ ID NO: 2347 - RNA, 19 nt, Artificial Sequence
  Synthetic siNA antisense region
guccauguuaauuucacua

SEQ ID NO: 2348 - RNA, 19 nt, Artificial Sequence
  Synthetic siNA antisense region
agccaaauuuggugaauug

SEQ ID NO: 2349 - RNA, 19 nt, Artificial Sequence
  Synthetic siNA antisense region
uguaacaauaagaggccaa

SEQ ID NO: 2350 - RNA, 19 nt, Artificial Sequence
  Synthetic siNA antisense region
ugaguuggcucuuagagcu

SEQ ID NO: 2351 - RNA, 19 nt, Artificial Sequence
  Synthetic siNA antisense region
auucuguaguuuaacagcu

SEQ ID NO: 2352 - RNA, 19 nt, Artificial Sequence
  Synthetic siNA antisense region
uacuggacucaguucauua

SEQ ID NO: 2353 - RNA, 19 nt, Artificial Sequence
  Synthetic siNA antisense region
ggacaucugucguagugcu

SEQ ID NO: 2354 - RNA, 19 nt, Artificial Sequence
  Synthetic siNA antisense region
ugugguaccagccgcacag

SEQ ID NO: 2355 - RNA, 19 nt, Artificial Sequence
  Synthetic siNA antisense region
aucaguacaagcuguuugu

SEQ ID NO: 2356 - RNA, 19 nt, Artificial Sequence
  Synthetic siNA antisense region
guaggcaagugcauuguca

SEQ ID NO: 2357 - RNA, 19 nt, Artificial Sequence
  Synthetic siNA antisense region
ucccuucgaauuguuauag

SEQ ID NO: 2358 - RNA, 19 nt, Artificial Sequence
  Synthetic siNA antisense region
ugccagcacaaaccuaccu

SEQ ID NO: 2359 - RNA, 19 nt, Artificial Sequence
  Synthetic siNA antisense region
uugguggucugauaguaau

SEQ ID NO: 2360 - RNA, 19 nt, Artificial Sequence
  Synthetic siNA antisense region
ucuagcccauuugagaucu

SEQ ID NO: 2361 - RNA, 19 nt, Artificial Sequence
  Synthetic siNA antisense region
accaucacucuuagggaau

SEQ ID NO: 2362 - RNA, 19 nt, Artificial Sequence
  Synthetic siNA antisense region
uguguaaauuguaccugua

SEQ ID NO: 2363 - RNA, 19 nt, Artificial Sequence
  Synthetic siNA antisense region
acaaggugguuccaguucu

SEQ ID NO: 2364 - RNA, 19 nt, Artificial Sequence
  Synthetic siNA antisense region
ugugucuguaacaaaccua

SEQ ID NO: 2365 - RNA, 19 nt, Artificial Sequence
  Synthetic siNA antisense region
cacuuuaggcccuuuuggu

SEQ ID NO: 2366 - RNA, 19 nt, Artificial Sequence
  Synthetic siNA antisense region
gaugaaguacaaguauuuc

SEQ ID NO: 2367 - RNA, 19 nt, Artificial Sequence
  Synthetic siNA antisense region
uagguuguuuaagccuuug

SEQ ID NO: 2368 - RNA, 19 nt, Artificial Sequence
  Synthetic siNA antisense region
cagcaccauaccucuauuu

SEQ ID NO: 2369 - RNA, 19 nt, Artificial Sequence
  Synthetic siNA antisense region
uguagcagcuaaacugccc

SEQ ID NO: 2370 - RNA, 19 nt, Artificial Sequence
  Synthetic siNA antisense region
uccagccugaagacguacu

SEQ ID NO: 2371 - RNA, 19 nt, Artificial Sequence
  Synthetic siNA antisense region
agguacuucuguagcauuu

SEQ ID NO: 2372 - RNA, 19 nt, Artificial Sequence
  Synthetic siNA antisense region
aagcacaguugaauuggca

SEQ ID NO: 2373 - RNA, 19 nt, Artificial Sequence
  Synthetic siNA antisense region
ugcaaaagcacagaaggaa

SEQ ID NO: 2374 - RNA, 19 nt, Artificial Sequence
  Synthetic siNA antisense region
ugcuuuagcagggucuacu

SEQ ID NO: 2375 - RNA, 19 nt, Artificial Sequence
  Synthetic siNA antisense region
ugcuagguaauccuuauau

SEQ ID NO: 2376 - RNA, 19 nt, Artificial Sequence
  Synthetic siNA antisense region
gauugguuguccuccacuu

SEQ ID NO: 2377 - RNA, 19 nt, Artificial Sequence
  Synthetic siNA antisense region
caucuucacacaguuggug

SEQ ID NO: 2378 - RNA, 19 nt, Artificial Sequence
  Synthetic siNA antisense region
accaguguguguacacaac

SEQ ID NO: 2379 - RNA, 19 nt, Artificial Sequence
  Synthetic siNA antisense region
aguaauugccuguccugua

SEQ ID NO: 2380 - RNA, 19 nt, Artificial Sequence
  Synthetic siNA antisense region
guuagcuucugguguuaca

SEQ ID NO: 2381 - RNA, 19 nt, Artificial Sequence
  Synthetic siNA antisense region
aaaggacucuugguccaug

SEQ ID NO: 2382 - RNA, 19 nt, Artificial Sequence
  Synthetic siNA antisense region
acaacaugaagcaccacca

SEQ ID NO: 2383 - RNA, 19 nt, Artificial Sequence
  Synthetic siNA antisense region
guggcaucuacaauacaga

SEQ ID NO: 2384 - RNA, 19 nt, Artificial Sequence
  Synthetic siNA antisense region
aggauuuggauggucaaug

SEQ ID NO: 2385 - RNA, 19 nt, Artificial Sequence
  Synthetic siNA antisense region
caagucacagaauccuuua

SEQ ID NO: 2386 - RNA, 19 nt, Artificial Sequence
  Synthetic siNA antisense region
uuggacguacuuaccuuuc

SEQ ID NO: 2387 - RNA, 19 nt, Artificial Sequence
  Synthetic siNA antisense region
agcacaagugguagguauu

SEQ ID NO: 2388 - RNA, 19 nt, Artificial Sequence
  Synthetic siNA antisense region
aaaacccacugggucauua

SEQ ID NO: 2389 - RNA, 19 nt, Artificial Sequence
  Synthetic siNA antisense region
gacuguguuucuaagugua

SEQ ID NO: 2390 - RNA, 19 nt, Artificial Sequence
  Synthetic siNA antisense region
cauuccgcagacgguacag

SEQ ID NO: 2391 - RNA, 19 nt, Artificial Sequence
  Synthetic siNA antisense region
acagccauaaccuuuccac

SEQ ID NO: 2392 - RNA, 19 nt, Artificial Sequence
  Synthetic siNA antisense region
gcggaguuggucacaacua

SEQ ID NO: 2393 - RNA, 19 nt, Artificial Sequence
  Synthetic siNA antisense region
agacugcaucaaggguucg

SEQ ID NO: 2394 - RNA, 19 nt, Artificial Sequence
  Synthetic siNA antisense region
aaacguugaugcauccgca

SEQ ID NO: 2395 - RNA, 19 nt, Artificial Sequence
  Synthetic siNA antisense region
caccgcaaacccguuuaaa

SEQ ID NO: 2396 - RNA, 19 nt, Artificial Sequence
  Synthetic siNA antisense region
uaagacgggcugcacuuac

SEQ ID NO: 2397 - RNA, 19 nt, Artificial Sequence
  Synthetic siNA antisense region
ugccugugccgcacggugu

SEQ ID NO: 2398 - RNA, 19 nt, Artificial Sequence
  Synthetic siNA antisense region
agacgacaucaguacuagu

SEQ ID NO: 2399 - RNA, 19 nt, Artificial Sequence
  Synthetic siNA antisense region
aaauaucaaaagcccugua

SEQ ID NO: 2400 - RNA, 19 nt, Artificial Sequence
  Synthetic siNA antisense region
cagcaacuuuuucguugua

SEQ ID NO: 2401 - RNA, 19 nt, Artificial Sequence
  Synthetic siNA antisense region
uuaggaacuuugcaaaacc

SEQ ID NO: 2402 - RNA, 19 nt, Artificial Sequence
  Synthetic siNA antisense region
agcgacagcaauuaguuuu

SEQ ID NO: 2403 - RNA, 19 nt, Artificial Sequence
  Synthetic siNA antisense region
ccucauccuucuccuggaa

SEQ ID NO: 2404 - RNA, 19 nt, Artificial Sequence
  Synthetic siNA antisense region
agucuaauaaauugccuuc

SEQ ID NO: 2405 - RNA, 19 nt, Artificial Sequence
  Synthetic siNA antisense region
ucuuaacuacaaaguaaga

SEQ ID NO: 2406 - RNA, 19 nt, Artificial Sequence
  Synthetic siNA antisense region
aguuagacauaguaugccu

SEQ ID NO: 2407 - RNA, 19 nt, Artificial Sequence
  Synthetic siNA antisense region
uagucucuucauguuggua

SEQ ID NO: 2408 - RNA, 19 nt, Artificial Sequence
  Synthetic siNA antisense region
cuuuaaccaaguuauaaau

SEQ ID NO: 2409 - RNA, 19 nt, Artificial Sequence
  Synthetic siNA antisense region
cagcaaccgcuggacaauc

SEQ ID NO: 2410 - RNA, 19 nt, Artificial Sequence
  Synthetic siNA antisense region
acuugaaaaagucauggac

SEQ ID NO: 2411 - RNA, 19 nt, Artificial Sequence
  Synthetic siNA antisense region
ugucaccaucuacucuaaa

SEQ ID NO: 2412 - RNA, 19 nt, Artificial Sequence
  Synthetic siNA antisense region
gugauauaugugguaccau

SEQ ID NO: 2413 - RNA, 19 nt, Artificial Sequence
  Synthetic siNA antisense region
auuuaguuagacgcugacg

SEQ ID NO: 2414 - RNA, 19 nt, Artificial Sequence
  Synthetic siNA antisense region
cuaaaucagccauugugua

SEQ ID NO: 2415 - RNA, 19 nt, Artificial Sequence
  Synthetic siNA antisense region
aaugacguagagcauagac

SEQ ID NO: 2416 - RNA, 19 nt, Artificial Sequence
  Synthetic siNA antisense region
cacaauuacccucaucaaa

SEQ ID NO: 2417 - RNA, 19 nt, Artificial Sequence
  Synthetic siNA antisense region
guauuucuuuuaauguauc

SEQ ID NO: 2418 - RNA, 19 nt, Artificial Sequence
  Synthetic siNA antisense region
agcaauuguaugugacgag

SEQ ID NO: 2419 - RNA, 19 nt, Artificial Sequence
  Synthetic siNA antisense region
ugaaauaaucaucaucaca

SEQ ID NO: 2420 - RNA, 19 nt, Artificial Sequence
  Synthetic siNA antisense region
cauaccaauccuucuuauu

SEQ ID NO: 2421 - RNA, 19 nt, Artificial Sequence
  Synthetic siNA antisense region
caggauucucuacgaaguc

SEQ ID NO: 2422 - RNA, 19 nt, Artificial Sequence
  Synthetic siNA antisense region
cauauacgcguaagauguc

SEQ ID NO: 2423 - RNA, 19 nt, Artificial Sequence
  Synthetic siNA antisense region
cacgcucaccuaaguuagc

SEQ ID NO: 2424 - RNA, 19 nt, Artificial Sequence
  Synthetic siNA antisense region
uuaauaaugauuggcguac

SEQ ID NO: 2425 - RNA, 19 nt, Artificial Sequence
  Synthetic siNA antisense region
cgcagaauuguacagucuu

SEQ ID NO: 2426 - RNA, 19 nt, Artificial Sequence
  Synthetic siNA antisense region
cugcaucacgcauagcauc

SEQ ID NO: 2427 - RNA, 19 nt, Artificial Sequence
  Synthetic siNA antisense region
ucaguacgccuacaaugcc

SEQ ID NO: 2428 - RNA, 19 nt, Artificial Sequence
  Synthetic siNA antisense region
gauccugauuaucuaaugu

SEQ ID NO: 2429 - RNA, 19 nt, Artificial Sequence
  Synthetic siNA antisense region
cguaccaguucccauuaag

SEQ ID NO: 2430 - RNA, 19 nt, Artificial Sequence
  Synthetic siNA antisense region
guacgaaaucaccgaaauc

SEQ ID NO: 2431 - RNA, 19 nt, Artificial Sequence
  Synthetic siNA antisense region
cgcagccuggugcuacuug

SEQ ID NO: 2432 - RNA, 19 nt, Artificial Sequence
  Synthetic siNA antisense region
aauccacaauaggaacucc

SEQ ID NO: 2433 - RNA, 19 nt, Artificial Sequence
  Synthetic siNA antisense region
ucagcaaugaguaauauga

SEQ ID NO: 2434 - RNA, 19 nt, Artificial Sequence
  Synthetic siNA antisense region
ucaaagugaggaugggcau

SEQ ID NO: 2435 - RNA, 19 nt, Artificial Sequence
  Synthetic siNA antisense region
cagcagccaaugcccuagu

SEQ ID NO: 2436 - RNA, 19 nt, Artificial Sequence
  Synthetic siNA antisense region
cagcauccauaugggacuc

SEQ ID NO: 2437 - RNA, 19 nt, Artificial Sequence
  Synthetic siNA antisense region
uaagugguuuugcgagauc

SEQ ID NO: 2438 - RNA, 19 nt, Artificial Sequence
  Synthetic siNA antisense region
ucagcaaaucccacuuaau

SEQ ID NO: 2439 - RNA, 19 nt, Artificial Sequence
  Synthetic siNA antisense region
cuuccguaaaaucauauuu

SEQ ID NO: 2440 - RNA, 19 nt, Artificial Sequence
  Synthetic siNA antisense region
cgaagagacaaagucucuc

SEQ ID NO: 2441 - RNA, 19 nt, Artificial Sequence
  Synthetic siNA antisense region
aauauuuaaaauaacgguc

SEQ ID NO: 2442 - RNA, 19 nt, Artificial Sequence
  Synthetic siNA antisense region
gaugguaugucugguccca

SEQ ID NO: 2443 - RNA, 19 nt, Artificial Sequence
  Synthetic siNA antisense region
aacaguuaauacaauuggg

SEQ ID NO: 2444 - RNA, 19 nt, Artificial Sequence
  Synthetic siNA antisense region
ggauacaccuaucauccaa

SEQ ID NO: 2445 - RNA, 19 nt, Artificial Sequence
  Synthetic siNA antisense region
uaaaguuugcacaaugaag

SEQ ID NO: 2446 - RNA, 19 nt, Artificial Sequence
  Synthetic siNA antisense region
caguagaaaauaacacauu

SEQ ID NO: 2447 - RNA, 19 nt, Artificial Sequence
  Synthetic siNA antisense region
aacuuguagguggaaacac

SEQ ID NO: 2448 - RNA, 19 nt, Artificial Sequence
  Synthetic siNA antisense region
uucuuacuagugguccaaa

SEQ ID NO: 2449 - RNA, 19 nt, Artificial Sequence
  Synthetic siNA antisense region
caccaucuacaaauauuuu

SEQ ID NO: 2450 - RNA, 19 nt, Artificial Sequence
  Synthetic siNA antisense region
uugaaacaacaaaaggaac

SEQ ID NO: 2451 - RNA, 19 nt, Artificial Sequence
  Synthetic siNA antisense region
cacgaaaaugguauccagu

SEQ ID NO: 2452 - RNA, 19 nt, Artificial Sequence
  Synthetic siNA antisense region
uauguacgacuccuaacuc

SEQ ID NO: 2453 - RNA, 19 nt, Artificial Sequence
  Synthetic siNA antisense region
guaaguuuacauccugauu

SEQ ID NO: 2454 - RNA, 19 nt, Artificial Sequence
  Synthetic siNA antisense region
aacugagacgcgagcuaug

SEQ ID NO: 2455 - RNA, 19 nt, Artificial Sequence
  Synthetic siNA antisense region
acacuaaaaguuccuugaa

SEQ ID NO: 2456 - RNA, 19 nt, Artificial Sequence
  Synthetic siNA antisense region
uagcuggaucagcagcaua

SEQ ID NO: 2457 - RNA, 19 nt, Artificial Sequence
  Synthetic siNA antisense region
ugccagaagcugcaugcau

SEQ ID NO: 2458 - RNA, 19 nt, Artificial Sequence
  Synthetic siNA antisense region
guuuaucuagcaauaaauu

SEQ ID NO: 2459 - RNA, 19 nt, Artificial Sequence
  Synthetic siNA antisense region
cugaaaagcauguagugcg

SEQ ID NO: 2460 - RNA, 19 nt, Artificial Sequence
  Synthetic siNA antisense region
uguuuguuagugcagcuac

SEQ ID NO: 2461 - RNA, 19 nt, Artificial Sequence
  Synthetic siNA antisense region
caguuugaaaagcaacauu

SEQ ID NO: 2462 - RNA, 19 nt, Artificial Sequence
  Synthetic siNA antisense region
uaaaauuaccggguuugac

SEQ ID NO: 2463 - RNA, 19 nt, Artificial Sequence
  Synthetic siNA antisense region
agucauaaaagucuuuauu

SEQ ID NO: 2464 - RNA, 19 nt, Artificial Sequence
  Synthetic siNA antisense region
aaccuuuagacacagcaaa

SEQ ID NO: 2465 - RNA, 19 nt, Artificial Sequence
  Synthetic siNA antisense region
aacuuccuuccuuaaagaa

SEQ ID NO: 2466 - RNA, 19 nt, Artificial Sequence
  Synthetic siNA antisense region
aguguuuuaguucaacaga

SEQ ID NO: 2467 - RNA, 19 nt, Artificial Sequence
  Synthetic siNA antisense region
cauccugagcaaagaagaa

SEQ ID NO: 2468 - RNA, 19 nt, Artificial Sequence
  Synthetic siNA antisense region
cacugauagcagcguugcc

SEQ ID NO: 2469 - RNA, 19 nt, Artificial Sequence
  Synthetic siNA antisense region
aacgauaauagucauaauc

SEQ ID NO: 2470 - RNA, 19 nt, Artificial Sequence
  Synthetic siNA antisense region
acauuguuggcagauuaua

SEQ ID NO: 2471 - RNA, 19 nt, Artificial Sequence
  Synthetic siNA antisense region
ggaguugucugauaucaca

SEQ ID NO: 2472 - RNA, 19 nt, Artificial Sequence
  Synthetic siNA antisense region
caacuucaacuacgaauag

SEQ ID NO: 2473 - RNA, 19 nt, Artificial Sequence
  Synthetic siNA antisense region
aaucaaaguauuuaucaac

SEQ ID NO: 2474 - RNA, 19 nt, Artificial Sequence
  Synthetic siNA antisense region
uacagccaccaucguaaca

SEQ ID NO: 2475 - RNA, 19 nt, Artificial Sequence
  Synthetic siNA antisense region
uuacuugguuggcauuaau

SEQ ID NO: 2476 - RNA, 19 nt, Artificial Sequence
  Synthetic siNA antisense region
uauccagauuguuaacgau

SEQ ID NO: 2477 - RNA, 19 nt, Artificial Sequence
  Synthetic siNA antisense region
augggaaaccagcugauuu

SEQ ID NO: 2478 - RNA, 19 nt, Artificial Sequence
  Synthetic siNA antisense region
ccuuaccccauuuauuaaa

SEQ ID NO: 2479 - RNA, 19 nt, Artificial Sequence
  Synthetic siNA antisense region
agucauaauaaagucuagc

SEQ ID NO: 2480 - RNA, 19 nt, Artificial Sequence
  Synthetic siNA antisense region
gauccucauaacucauuga

SEQ ID NO: 2481 - RNA, 19 nt, Artificial Sequence
  Synthetic siNA antisense region
acgcgaaaagugcaucuug

SEQ ID NO: 2482 - RNA, 19 nt, Artificial Sequence
  Synthetic siNA antisense region
ugacauuacgcuuaguaua

SEQ ID NO: 2483 - RNA, 19 nt, Artificial Sequence
  Synthetic siNA antisense region
uuugaguuauaguagggau

SEQ ID NO: 2484 - RNA, 19 nt, Artificial Sequence
  Synthetic siNA antisense region
uggcauacuuaagauucau

SEQ ID NO: 2485 - RNA, 19 nt, Artificial Sequence
  Synthetic siNA antisense region
cucuauucuuugcacuaau

SEQ ID NO: 2486 - RNA, 19 nt, Artificial Sequence
  Synthetic siNA antisense region
caccagcuacggugcgagc

SEQ ID NO: 2487 - RNA, 19 nt, Artificial Sequence
  Synthetic siNA antisense region
uaguacuacagauagagac

SEQ ID NO: 2488 - RNA, 19 nt, Artificial Sequence
  Synthetic siNA antisense region
gaaacugucuauuugucau

SEQ ID NO: 2489 - RNA, 19 nt, Artificial Sequence
  Synthetic siNA antisense region
acuucaauaauuucugaug

SEQ ID NO: 2490 - RNA, 19 nt, Artificial Sequence
  Synthetic siNA antisense region
cucuaguggcggcuauuga

SEQ ID NO: 2491 - RNA, 19 nt, Artificial Sequence
  Synthetic siNA antisense region
caauuaccacaguagcucc

SEQ ID NO: 2492 - RNA, 19 nt, Artificial Sequence
  Synthetic siNA antisense region
cguaaaacuugcuuguucc

SEQ ID NO: 2493 - RNA, 19 nt, Artificial Sequence
  Synthetic siNA antisense region
acauauuaugccagccacc

SEQ ID NO: 2494 - RNA, 19 nt, Artificial Sequence
  Synthetic siNA antisense region
cacuguaaacaguuuuuaa

SEQ ID NO: 2495 - RNA, 19 nt, Artificial Sequence
  Synthetic siNA antisense region
gguguggaguuucuacauc

SEQ ID NO: 2496 - RNA, 19 nt, Artificial Sequence
  Synthetic siNA antisense region
gauaaucccaacccauaag

SEQ ID NO: 2497 - RNA, 19 nt, Artificial Sequence
  Synthetic siNA antisense region
uggcucugucacauuuugg

SEQ ID NO: 2498 - RNA, 19 nt, Artificial Sequence
  Synthetic siNA antisense region
uccuaagcauguuaggcau

SEQ ID NO: 2499 - RNA, 19 nt, Artificial Sequence
  Synthetic siNA antisense region
gaacaagagaggccauuau

SEQ ID NO: 2500 - RNA, 19 nt, Artificial Sequence
  Synthetic siNA antisense region
uguuauguuugcgagcaag

SEQ ID NO: 2501 - RNA, 19 nt, Artificial Sequence
  Synthetic siNA antisense region
gugauaaguuacagcaagu

SEQ ID NO: 2502 - RNA, 19 nt, Artificial Sequence
  Synthetic siNA antisense region
cuaaccuguagaaacggug

SEQ ID NO: 2503 - RNA, 19 nt, Artificial Sequence
  Synthetic siNA antisense region
cuugcgcacacucguuagc

SEQ ID NO: 2504 - RNA, 19 nt, Artificial Sequence
  Synthetic siNA antisense region
ugaccaucucacuuaauac

SEQ ID NO: 2505 - RNA, 19 nt, Artificial Sequence
  Synthetic siNA antisense region
auagugagccgccacacau

SEQ ID NO: 2506 - RNA, 19 nt, Artificial Sequence
  Synthetic siNA antisense region
uuccaccugguuuaacaua

SEQ ID NO: 2507 - RNA, 19 nt, Artificial Sequence
  Synthetic siNA antisense region
uagcaucaccggaugaugu

SEQ ID NO: 2508 - RNA, 19 nt, Artificial Sequence
  Synthetic siNA antisense region
uauuagcauaagcaguugu

SEQ ID NO: 2509 - RNA, 19 nt, Artificial Sequence
  Synthetic siNA antisense region
gacaaauguuaaagacacu

SEQ ID NO: 2510 - RNA, 19 nt, Artificial Sequence
  Synthetic siNA antisense region
cauuggcuguaacagcuug

SEQ ID NO: 2511 - RNA, 19 nt, Artificial Sequence
  Synthetic siNA antisense region
uugaaagaagugcauuuac

SEQ ID NO: 2512 - RNA, 19 nt, Artificial Sequence
  Synthetic siNA antisense region
cuaucuuauuaccaucagu

SEQ ID NO: 2513 - RNA, 19 nt, Artificial Sequence
  Synthetic siNA antisense region
ugcggacauacuugucagc

SEQ ID NO: 2514 - RNA, 19 nt, Artificial Sequence
  Synthetic siNA antisense region
agagccuguguuguagauu

SEQ ID NO: 2515 - RNA, 19 nt, Artificial Sequence
  Synthetic siNA antisense region
uucuauagagacacucaua

SEQ ID NO: 2516 - RNA, 19 nt, Artificial Sequence
  Synthetic siNA antisense region
caugaucaacaucccuauu

SEQ ID NO: 2517 - RNA, 19 nt, Artificial Sequence
  Synthetic siNA antisense region
aaaacucauccacgaauuc

SEQ ID NO: 2518 - RNA, 19 nt, Artificial Sequence
  Synthetic siNA antisense region
guuuacgcagguaagcgua

SEQ ID NO: 2519 - RNA, 19 nt, Artificial Sequence
  Synthetic siNA antisense region
gaaucaucauggagaaaug

SEQ ID NO: 2520 - RNA, 19 nt, Artificial Sequence
  Synthetic siNA antisense region
caacggcaucaucagaaag

SEQ ID NO: 2521 - RNA, 19 nt, Artificial Sequence
  Synthetic siNA antisense region
aguuacuguuauagcacac

SEQ ID NO: 2522 - RNA, 19 nt, Artificial Sequence
  Synthetic siNA antisense region
cuaaaccuugagccgcaua

SEQ ID NO: 2523 - RNA, 19 nt, Artificial Sequence
  Synthetic siNA antisense region
aguucuuaaugcuagcuac

SEQ ID NO: 2524 - RNA, 19 nt, Artificial Sequence
  Synthetic siNA antisense region
aauaaagaacugccuuaaa

SEQ ID NO: 2525 - RNA, 19 nt, Artificial Sequence
  Synthetic siNA antisense region
ugaacacauuauuuugaua

SEQ ID NO: 2526 - RNA, 19 nt, Artificial Sequence
  Synthetic siNA antisense region
aacauuuugccucagacau

SEQ ID NO: 2527 - RNA, 19 nt, Artificial Sequence
  Synthetic siNA antisense region
uaaggucagucucagucca

SEQ ID NO: 2528 - RNA, 19 nt, Artificial Sequence
  Synthetic siNA antisense region
auucgugagguccuuuagu

SEQ ID NO: 2529 - RNA, 19 nt, Artificial Sequence
  Synthetic siNA antisense region
uuguaugcugugagcaaaa

SEQ ID NO: 2530 - RNA, 19 nt, Artificial Sequence
  Synthetic siNA antisense region
cuccuuguuuaacuagcau

SEQ ID NO: 2531 - RNA, 19 nt, Artificial Sequence
  Synthetic siNA antisense region
gcagguacacguaaucauc

SEQ ID NO: 2532 - RNA, 19 nt, Artificial Sequence
  Synthetic siNA antisense region
uugauggaucuggguaagg

SEQ ID NO: 2533 - RNA, 19 nt, Artificial Sequence
  Synthetic siNA antisense region
agccugcgccuaauauucu

SEQ ID NO: 2534 - RNA, 19 nt, Artificial Sequence
  Synthetic siNA antisense region
caauaucaucgacaaaaca

SEQ ID NO: 2535 - RNA, 19 nt, Artificial Sequence
  Synthetic siNA antisense region
guguaccaucuguuuugac

SEQ ID NO: 2536 - RNA, 19 nt, Artificial Sequence
  Synthetic siNA antisense region
cgaaccuuucaaucauaag

SEQ ID NO: 2537 - RNA, 19 nt, Artificial Sequence
  Synthetic siNA antisense region
caucaauagccagugacac

SEQ ID NO: 2538 - RNA, 19 nt, Artificial Sequence
  Synthetic siNA antisense region
guuuuguaaguggguaagc

SEQ ID NO: 2539 - RNA, 19 nt, Artificial Sequence
  Synthetic siNA antisense region
cauacuccugauuaggaug

SEQ ID NO: 2540 - RNA, 19 nt, Artificial Sequence
  Synthetic siNA antisense region
acaagugaaagacaucagc

SEQ ID NO: 2541 - RNA, 19 nt, Artificial Sequence
  Synthetic siNA antisense region
uucuaauguauuguaaaua

SEQ ID NO: 2542 - RNA, 19 nt, Artificial Sequence
  Synthetic siNA antisense region
uaagcucaucauguaacuu

SEQ ID NO: 2543 - RNA, 19 nt, Artificial Sequence
  Synthetic siNA antisense region
uguccaacauguggccagu

SEQ ID NO: 2544 - RNA, 19 nt, Artificial Sequence
  Synthetic siNA antisense region
uuagcauuacggaauacau

SEQ ID NO: 2545 - RNA, 19 nt, Artificial Sequence
  Synthetic siNA antisense region
gugagguguuaucauuagu

SEQ ID NO: 2546 - RNA, 19 nt, Artificial Sequence
  Synthetic siNA antisense region
acucagguucccaguaccg

SEQ ID NO: 2547 - RNA, 19 nt, Artificial Sequence
  Synthetic siNA antisense region
uguacauagccucauaaaa

SEQ ID NO: 2548 - RNA, 19 nt, Artificial Sequence
  Synthetic siNA antisense region
gcaagacuguauguggugu

SEQ ID NO: 2549 - RNA, 19 nt, Artificial Sequence
  Synthetic siNA antisense region
cacaagcaccuacagccug

SEQ ID NO: 2550 - RNA, 19 nt, Artificial Sequence
  Synthetic siNA antisense region
ucugugaauugcacaauac

SEQ ID NO: 2551 - RNA, 19 nt, Artificial Sequence
  Synthetic siNA antisense region
caccgcaacgaagugaagu

SEQ ID NO: 2552 - RNA, 19 nt, Artificial Sequence
  Synthetic siNA antisense region
auggucuccuaauacaggc

SEQ ID NO: 2553 - RNA, 19 nt, Artificial Sequence
  Synthetic siNA antisense region
agcacuugcaacauaggaa

SEQ ID NO: 2554 - RNA, 19 nt, Artificial Sequence
  Synthetic siNA antisense region
aaaugacauggucauagca

SEQ ID NO: 2555 - RNA, 19 nt, Artificial Sequence
  Synthetic siNA antisense region
cuaauuugugugauguuga

SEQ ID NO: 2556 - RNA, 19 nt, Artificial Sequence
  Synthetic siNA antisense region
agggauuaacagacaacac

SEQ ID NO: 2557 - RNA, 19 nt, Artificial Sequence
  Synthetic siNA antisense region
cuggggcauugcaaacaua

SEQ ID NO: 2558 - RNA, 19 nt, Artificial Sequence
  Synthetic siNA antisense region
caucagugacaucacaacc

SEQ ID NO: 2559 - RNA, 19 nt, Artificial Sequence
  Synthetic siNA antisense region
cuagauacaguugugucac

SEQ ID NO: 2560 - RNA, 19 nt, Artificial Sequence
  Synthetic siNA antisense region
aauaauagcucauaccucc

SEQ ID NO: 2561 - RNA, 19 nt, Artificial Sequence
  Synthetic siNA antisense region
gaggcuuaugugacuugca

SEQ ID NO: 2562 - RNA, 19 nt, Artificial Sequence
  Synthetic siNA antisense region
auaauggaaaacuaauggg

SEQ ID NO: 2563 - RNA, 19 nt, Artificial Sequence
  Synthetic siNA antisense region
aaaccugaccauuagcaca

SEQ ID NO: 2564 - RNA, 19 nt, Artificial Sequence
  Synthetic siNA antisense region
uguuuuuguauaaaccaaa

SEQ ID NO: 2565 - RNA, 19 nt, Artificial Sequence
  Synthetic siNA antisense region
ugucacugccuacacaugu

SEQ ID NO: 2566 - RNA, 19 nt, Artificial Sequence
  Synthetic siNA antisense region
cauugaagucagugacauu

SEQ ID NO: 2567 - RNA, 19 nt, Artificial Sequence
  Synthetic siNA antisense region
aaucacauguugcuaucgc

SEQ ID NO: 2568 - RNA, 19 nt, Artificial Sequence
  Synthetic siNA antisense region
aaucgccagcauuagucca

SEQ ID NO: 2569 - RNA, 19 nt, Artificial Sequence
  Synthetic siNA antisense region
aaguguuggcaaguaugua

SEQ ID NO: 2570 - RNA, 19 nt, Artificial Sequence
  Synthetic siNA antisense region
gcuugagucucucaguaca

SEQ ID NO: 2571 - RNA, 19 nt, Artificial Sequence
  Synthetic siNA antisense region
gcguuucugcugcgaaaag

SEQ ID NO: 2572 - RNA, 19 nt, Artificial Sequence
  Synthetic siNA antisense region
uuuccucaguggcuuugag

SEQ ID NO: 2573 - RNA, 19 nt, Artificial Sequence
  Synthetic siNA antisense region
cauaugacagcuuaaaugu

SEQ ID NO: 2574 - RNA, 19 nt, Artificial Sequence
  Synthetic siNA antisense region
cgcguacaguggcaauacc

SEQ ID NO: 2575 - RNA, 19 nt, Artificial Sequence
  Synthetic siNA antisense region
cucugucagagaguacuuc

SEQ ID NO: 2576 - RNA, 19 nt, Artificial Sequence
  Synthetic siNA antisense region
cccaugaaagaugcaauuc

SEQ ID NO: 2577 - RNA, 19 nt, Artificial Sequence
  Synthetic siNA antisense region
gucuagguuuuccaaccuc

SEQ ID NO: 2578 - RNA, 19 nt, Artificial Sequence
  Synthetic siNA antisense region
aguuucuguucaauggugg

SEQ ID NO: 2579 - RNA, 19 nt, Artificial Sequence
  Synthetic siNA antisense region
gguaaccaguaaagacaua

SEQ ID NO: 2580 - RNA, 19 nt, Artificial Sequence
  Synthetic siNA antisense region
uacuauuuuuaguuacacg

SEQ ID NO: 2581 - RNA, 19 nt, Artificial Sequence
  Synthetic siNA antisense region
acucuccaaucuguacuuu

SEQ ID NO: 2582 - RNA, 19 nt, Artificial Sequence
  Synthetic siNA antisense region
caccuuuuucaaaggugua

SEQ ID NO: 2583 - RNA, 19 nt, Artificial Sequence
  Synthetic siNA antisense region
caacagcaucaccauaguc

SEQ ID NO: 2584 - RNA, 19 nt, Artificial Sequence
  Synthetic siNA antisense region
ucguaguaccucuguacac

SEQ ID NO: 2585 - RNA, 19 nt, Artificial Sequence
  Synthetic siNA antisense region
caacauucaacuuguaugu

SEQ ID NO: 2586 - RNA, 19 nt, Artificial Sequence
  Synthetic siNA antisense region
ucaacacaaaguaaucacc

SEQ ID NO: 2587 - RNA, 19 nt, Artificial Sequence
  Synthetic siNA antisense region
gcauuacagugugagaugu

SEQ ID NO: 2588 - RNA, 19 nt, Artificial Sequence
  Synthetic siNA antisense region
gaguaggugcacuaagugg

SEQ ID NO: 2589 - RNA, 19 nt, Artificial Sequence
  Synthetic siNA antisense region
agugcucuuguggcacuag

SEQ ID NO: 2590 - RNA, 19 nt, Artificial Sequence
  Synthetic siNA antisense region
agccaguaauucucacaua

SEQ ID NO: 2591 - RNA, 19 nt, Artificial Sequence
  Synthetic siNA antisense region
uguugaguguuggguacaa

SEQ ID NO: 2592 - RNA, 19 nt, Artificial Sequence
  Synthetic siNA antisense region
uagaaaacucaucugagau

SEQ ID NO: 2593 - RNA, 19 nt, Artificial Sequence
  Synthetic siNA antisense region
gauaauuugcaacauugcu

SEQ ID NO: 2594 - RNA, 19 nt, Artificial Sequence
  Synthetic siNA antisense region
uuugcaugccgaccuuuug

SEQ ID NO: 2595 - RNA, 19 nt, Artificial Sequence
  Synthetic siNA antisense region
cuuggaguguagaguacuu

SEQ ID NO: 2596 - RNA, 19 nt, Artificial Sequence
  Synthetic siNA antisense region
uaccaguaccagguggucc

SEQ ID NO: 2597 - RNA, 19 nt, Artificial Sequence
  Synthetic siNA antisense region
cgauggcaaaaugacucuu

SEQ ID NO: 2598 - RNA, 19 nt, Artificial Sequence
  Synthetic siNA antisense region
gguaauagagagcaagucc

SEQ ID NO: 2599 - RNA, 19 nt, Artificial Sequence
  Synthetic siNA antisense region
acacuaugcgagcagaugg

SEQ ID NO: 2600 - RNA, 19 nt, Artificial Sequence
  Synthetic siNA antisense region
caugagagcaugccguaua

SEQ ID NO: 2601 - RNA, 19 nt, Artificial Sequence
  Synthetic siNA antisense region
auagggcaucaacagcugc

SEQ ID NO: 2602 - RNA, 19 nt, Artificial Sequence
  Synthetic siNA antisense region
auuuuaaugccuuuucaca

SEQ ID NO: 2603 - RNA, 19 nt, Artificial Sequence
  Synthetic siNA antisense region
auuuaucuaugggcaaaua

SEQ ID NO: 2604 - RNA, 19 nt, Artificial Sequence
  Synthetic siNA antisense region
cagguaugauucuacuaca

SEQ ID NO: 2605 - RNA, 19 nt, Artificial Sequence
  Synthetic siNA antisense region
acucuacgcgcgcacgcgc

SEQ ID NO: 2606 - RNA, 19 nt, Artificial Sequence
  Synthetic siNA antisense region
cuuugaauuuaucaaaaca

SEQ ID NO: 2607 - RNA, 19 nt, Artificial Sequence
  Synthetic siNA antisense region
guucuaguguugaauucac

SEQ ID NO: 2608 - RNA, 19 nt, Artificial Sequence
  Synthetic siNA antisense region
cagugcagaaaacauacug

SEQ ID NO: 2609 - RNA, 19 nt, Artificial Sequence
  Synthetic siNA antisense region
uuucuggcaaugcauuuac

SEQ ID NO: 2610 - RNA, 19 nt, Artificial Sequence
  Synthetic siNA antisense region
cuacaaugucagcaguugu

SEQ ID NO: 2611 - RNA, 19 nt, Artificial Sequence
  Synthetic siNA antisense region
uagagauuucaucaaagac

SEQ ID NO: 2612 - RNA, 19 nt, Artificial Sequence
  Synthetic siNA antisense region
agucauaauuaguagccau

SEQ ID NO: 2613 - RNA, 19 nt, Artificial Sequence
  Synthetic siNA antisense region
uagcauugacaacacucaa

SEQ ID NO: 2614 - RNA, 19 nt, Artificial Sequence
  Synthetic siNA antisense region
aguguuuugcacgaagucu

SEQ ID NO: 2615 - RNA, 19 nt, Artificial Sequence
  Synthetic siNA antisense region
gaucgccaauauagacgua

SEQ ID NO: 2616 - RNA, 19 nt, Artificial Sequence
  Synthetic siNA antisense region
gggcugguaauugagcagg

SEQ ID NO: 2617 - RNA, 19 nt, Artificial Sequence
  Synthetic siNA antisense region
uagucagcaaugugcgggg

SEQ ID NO: 2618 - RNA, 19 nt, Artificial Sequence
  Synthetic siNA antisense region
cugguucuagugugccuuu

SEQ ID NO: 2619 - RNA, 19 nt, Artificial Sequence
  Synthetic siNA antisense region
acacugaauuaaaauauuc

SEQ ID NO: 2620 - RNA, 19 nt, Artificial Sequence
  Synthetic siNA antisense region
uuguuuucauaagucugca

SEQ ID NO: 2621 - RNA, 19 nt, Artificial Sequence
  Synthetic siNA antisense region
ggaacaugucuggaccuau

SEQ ID NO: 2622 - RNA, 19 nt, Artificial Sequence
  Synthetic siNA antisense region
aacggcgacaaguuccaag

SEQ ID NO: 2623 - RNA, 19 nt, Artificial Sequence
  Synthetic siNA antisense region
caacaauuucagcaggaca

SEQ ID NO: 2624 - RNA, 19 nt, Artificial Sequence
  Synthetic siNA antisense region
cuaaagcacucacaguguc

SEQ ID NO: 2625 - RNA, 19 nt, Artificial Sequence
  Synthetic siNA antisense region
uuagcuuauugucauaaac

SEQ ID NO: 2626 - RNA, 19 nt, Artificial Sequence
  Synthetic siNA antisense region
acuuauccuugugugcuuu

SEQ ID NO: 2627 - RNA, 19 nt, Artificial Sequence
  Synthetic siNA antisense region
uuuugaagcauugagcuga

SEQ ID NO: 2628 - RNA, 19 nt, Artificial Sequence
  Synthetic siNA antisense region
uaacaccuuuguagaacau

SEQ ID NO: 2629 - RNA, 19 nt, Artificial Sequence
  Synthetic siNA antisense region
augaaacaucauguguaau

SEQ ID NO: 2630 - RNA, 19 nt, Artificial Sequence
  Synthetic siNA antisense region
gaggucuguugauugcaga

SEQ ID NO: 2631 - RNA, 19 nt, Artificial Sequence
  Synthetic siNA antisense region
cucuuacaacgccuauuug

SEQ ID NO: 2632 - RNA, 19 nt, Artificial Sequence
  Synthetic siNA antisense region
gauugcguguaagaaauuc

SEQ ID NO: 2633 - RNA, 19 nt, Artificial Sequence
  Synthetic siNA antisense region
cagcuuuucuccaagcagg

SEQ ID NO: 2634 - RNA, 19 nt, Artificial Sequence
  Synthetic siNA antisense region
uauaaggugagauaaaaac

SEQ ID NO: 2635 - RNA, 19 nt, Artificial Sequence
  Synthetic siNA antisense region
cuacagcguucugugaauu

SEQ ID NO: 2636 - RNA, 19 nt, Artificial Sequence
  Synthetic siNA antisense region
auccuaagauuuuugaagc

SEQ ID NO: 2637 - RNA, 19 nt, Artificial Sequence
  Synthetic siNA antisense region
caacagucugcguaggcaa

SEQ ID NO: 2638 - RNA, 19 nt, Artificial Sequence
  Synthetic siNA antisense region
cagaacccugugaugaauc

SEQ ID NO: 2639 - RNA, 19 nt, Artificial Sequence
  Synthetic siNA antisense region
auaugacauagucauauuc

SEQ ID NO: 2640 - RNA, 19 nt, Artificial Sequence
  Synthetic siNA antisense region
uuucaguaguuugugugaa

SEQ ID NO: 2641 - RNA, 19 nt, Artificial Sequence
  Synthetic siNA antisense region
cauuacaagagugugcugu

SEQ ID NO: 2642 - RNA, 19 nt, Artificial Sequence
  Synthetic siNA antisense region
ccacauugaagcgguugac

SEQ ID NO: 2643 - RNA, 19 nt, Artificial Sequence
  Synthetic siNA antisense region
uuuuugcccuugugauagc

SEQ ID NO: 2644 - RNA, 19 nt, Artificial Sequence
  Synthetic siNA antisense region
uuaugcacaaaaugccaau

SEQ ID NO: 2645 - RNA, 19 nt, Artificial Sequence
  Synthetic siNA antisense region
aaagaucucuaucagacau

SEQ ID NO: 2646 - RNA, 19 nt, Artificial Sequence
  Synthetic siNA antisense region
uaaauugcaguuugucaua

SEQ ID NO: 2647 - RNA, 19 nt, Artificial Sequence
  Synthetic siNA antisense region
gugguauuucuagacuugu

SEQ ID NO: 2648 - RNA, 19 nt, Artificial Sequence
  Synthetic siNA antisense region
auguagccacauugcgacg

SEQ ID NO: 2649 - RNA, 19 nt, Artificial Sequence
  Synthetic siNA antisense region
uuacauuuucugcuuguaa

SEQ ID NO: 2650 - RNA, 19 nt, Artificial Sequence
  Synthetic siNA antisense region
aguccuuaaaaaguccagu

SEQ ID NO: 2651 - RNA, 19 nt, Artificial Sequence
  Synthetic siNA antisense region
caguaaugaucuuacuaca

SEQ ID NO: 2652 - RNA, 19 nt, Artificial Sequence
  Synthetic siNA antisense region
ccuguguaggaugaagacc

SEQ ID NO: 2653 - RNA, 19 nt, Artificial Sequence
  Synthetic siNA antisense region
cgcugagguguguaggugc

SEQ ID NO: 2654 - RNA, 19 nt, Artificial Sequence
  Synthetic siNA antisense region
ucuugaacuuuauaucaac

SEQ ID NO: 2655 - RNA, 19 nt, Artificial Sequence
  Synthetic siNA antisense region
caacacauaauccuucagu

SEQ ID NO: 2656 - RNA, 19 nt, Artificial Sequence
  Synthetic siNA antisense region
uugguaugccugguauguc

SEQ ID NO: 2657 - RNA, 19 nt, Artificial Sequence
  Synthetic siNA antisense region
uacgguaggucauguccuu

SEQ ID NO: 2658 - RNA, 19 nt, Artificial Sequence
  Synthetic siNA antisense region
ccaucauagagaugagucu

SEQ ID NO: 2659 - RNA, 19 nt, Artificial Sequence
  Synthetic siNA antisense region
gguaauucauuuugaaacc

SEQ ID NO: 2660 - RNA, 19 nt, Artificial Sequence
  Synthetic siNA antisense region
uaggguaaccauugacuug

SEQ ID NO: 2661 - RNA, 19 nt, Artificial Sequence
  Synthetic siNA antisense region
cgcgggugauaaacauauu

SEQ ID NO: 2662 - RNA, 19 nt, Artificial Sequence
  Synthetic siNA antisense region
cgugacgaauagcuucuuc

SEQ ID NO: 2663 - RNA, 19 nt, Artificial Sequence
  Synthetic siNA antisense region
agccaauccacgcacgaac

SEQ ID NO: 2664 - RNA, 19 nt, Artificial Sequence
  Synthetic siNA antisense region
gacagcccucuacaucaaa

SEQ ID NO: 2665 - RNA, 19 nt, Artificial Sequence
  Synthetic siNA antisense region
cagcaucucuaguugcaug

SEQ ID NO: 2666 - RNA, 19 nt, Artificial Sequence
  Synthetic siNA antisense region
gagguagguuaguacccac

SEQ ID NO: 2667 - RNA, 19 nt, Artificial Sequence
  Synthetic siNA antisense region
uagaaaauccuagcuggag

SEQ ID NO: 2668 - RNA, 19 nt, Artificial Sequence
  Synthetic siNA antisense region
cuacuaaguuaacaccugu

SEQ ID NO: 2669 - RNA, 19 nt, Artificial Sequence
  Synthetic siNA antisense region
cauaaccagucgguacagc

SEQ ID NO: 2670 - RNA, 19 nt, Artificial Sequence
  Synthetic siNA antisense region
uguuauuuucagugucaac

SEQ ID NO: 2671 - RNA, 19 nt, Artificial Sequence
  Synthetic siNA antisense region
uaacucuggugaauucugu

SEQ ID NO: 2672 - RNA, 19 nt, Artificial Sequence
  Synthetic siNA antisense region
cugguggagguuuugcauu

SEQ ID NO: 2673 - RNA, 19 nt, Artificial Sequence
  Synthetic siNA antisense region
gauguuuaaacuggucacc

SEQ ID NO: 2674 - RNA, 19 nt, Artificial Sequence
  Synthetic siNA antisense region
uauacaugagugguauaag

SEQ ID NO: 2675 - RNA, 19 nt, Artificial Sequence
  Synthetic siNA antisense region
cauuccagggcaagccuuu

SEQ ID NO: 2676 - RNA, 19 nt, Artificial Sequence
  Synthetic siNA antisense region
cuaucuuaauacgcacuac

SEQ ID NO: 2677 - RNA, 19 nt, Artificial Sequence
  Synthetic siNA antisense region
uaucacugagcauuuguac

SEQ ID NO: 2678 - RNA, 19 nt, Artificial Sequence
  Synthetic siNA antisense region
cugacaauccuuucagugu

SEQ ID NO: 2679 - RNA, 19 nt, Artificial Sequence
  Synthetic siNA antisense region
ggacgaacacgacucuguc

SEQ ID NO: 2680 - RNA, 19 nt, Artificial Sequence
  Synthetic siNA antisense region
caaagccaugcgcccaaag

SEQ ID NO: 2681 - RNA, 19 nt, Artificial Sequence
  Synthetic siNA antisense region
acuucauugauguaagcuc

SEQ ID NO: 2682 - RNA, 19 nt, Artificial Sequence
  Synthetic siNA antisense region
guccaaucuugacaaagua

SEQ ID NO: 2683 - RNA, 19 nt, Artificial Sequence
  Synthetic siNA antisense region
gacaacacguucuuucagg

SEQ ID NO: 2684 - RNA, 19 nt, Artificial Sequence
  Synthetic siNA antisense region
uugcacguuugucacacag

SEQ ID NO: 2685 - RNA, 19 nt, Artificial Sequence
  Synthetic siNA antisense region
augaaguagaaaagcaagu

SEQ ID NO: 2686 - RNA, 19 nt, Artificial Sequence
  Synthetic siNA antisense region
agcaggcauaaguaucuga

SEQ ID NO: 2687 - RNA, 19 nt, Artificial Sequence
  Synthetic siNA antisense region
aacccacagaaugauucca

SEQ ID NO: 2688 - RNA, 19 nt, Artificial Sequence
  Synthetic siNA antisense region
gguuauagacauagucaaa

SEQ ID NO: 2689 - RNA, 19 nt, Artificial Sequence
  Synthetic siNA antisense region
gaacaucaaucauaaaugg

SEQ ID NO: 2690 - RNA, 19 nt, Artificial Sequence
  Synthetic siNA antisense region
ccguaaagccccacugcug

SEQ ID NO: 2691 - RNA, 19 nt, Artificial Sequence
  Synthetic siNA antisense region
gguuacucugaagguuacc

SEQ ID NO: 2692 - RNA, 19 nt, Artificial Sequence
  Synthetic siNA antisense region
ccuggcaauguuggucaug

SEQ ID NO: 2693 - RNA, 19 nt, Artificial Sequence
  Synthetic siNA antisense region
caugugcauuuccauguac

SEQ ID NO: 2694 - RNA, 19 nt, Artificial Sequence
  Synthetic siNA antisense region
uagcaucacaacuagccac

SEQ ID NO: 2695 - RNA, 19 nt, Artificial Sequence
  Synthetic siNA antisense region
cuaaacaucuagucaugau

SEQ ID NO: 2696 - RNA, 19 nt, Artificial Sequence
  Synthetic siNA antisense region
caaagcacucauggacugc

SEQ ID NO: 2697 - RNA, 19 nt, Artificial Sequence
  Synthetic siNA antisense region
accaaucaacgcgcuuaac

SEQ ID NO: 2698 - RNA, 19 nt, Artificial Sequence
  Synthetic siNA antisense region
uaauaggguauucaacaga

SEQ ID NO: 2699 - RNA, 19 nt, Artificial Sequence
  Synthetic siNA antisense region
cccucaguucaucuccuau

SEQ ID NO: 2700 - RNA, 19 nt, Artificial Sequence
  Synthetic siNA antisense region
uucugcaagcagaauuaac

SEQ ID NO: 2701 - RNA, 19 nt, Artificial Sequence
  Synthetic siNA antisense region
caaccauguguuguacuuu

SEQ ID NO: 2702 - RNA, 19 nt, Artificial Sequence
  Synthetic siNA antisense region
caagcaaugcagacuucac

SEQ ID NO: 2703 - RNA, 19 nt, Artificial Sequence
  Synthetic siNA antisense region
gaacuggaaacuuaucagc

SEQ ID NO: 2704 - RNA, 19 nt, Artificial Sequence
  Synthetic siNA antisense region
gauuuccaaugucaugaag

SEQ ID NO: 2705 - RNA, 19 nt, Artificial Sequence
  Synthetic siNA antisense region
cacacuugauagccuuugg

SEQ ID NO: 2706 - RNA, 19 nt, Artificial Sequence
  Synthetic siNA antisense region
cuacuucagccugaggcac

SEQ ID NO: 2707 - RNA, 19 nt, Artificial Sequence
  Synthetic siNA antisense region
caucguagaacuuccauuc

SEQ ID NO: 2708 - RNA, 19 nt, Artificial Sequence
  Synthetic siNA antisense region
ugucacuacauggcugagc

SEQ ID NO: 2709 - RNA, 19 nt, Artificial Sequence
  Synthetic siNA antisense region
ccucuauuuuguaagcuuu

SEQ ID NO: 2710 - RNA, 19 nt, Artificial Sequence
  Synthetic siNA antisense region
cauaagaauagaagaguuc

SEQ ID NO: 2711 - RNA, 19 nt, Artificial Sequence
  Synthetic siNA antisense region
auuuaucgugauguguagc

SEQ ID NO: 2712 - RNA, 19 nt, Artificial Sequence
  Synthetic siNA antisense region
aacaaacaccaucagugaa

SEQ ID NO: 2713 - RNA, 19 nt, Artificial Sequence
  Synthetic siNA antisense region
cguuacaauuccaaaacaa

SEQ ID NO: 2714 - RNA, 19 nt, Artificial Sequence
  Synthetic siNA antisense region
uggcuggguaacgaucaac

SEQ ID NO: 2715 - RNA, 19 nt, Artificial Sequence
  Synthetic siNA antisense region
accuacacacaauugcauu

SEQ ID NO: 2716 - RNA, 19 nt, Artificial Sequence
  Synthetic siNA antisense region
acaagacucuugugucaaa

SEQ ID NO: 2717 - RNA, 19 nt, Artificial Sequence
  Synthetic siNA antisense region
cugguaaguucaaguuuga

SEQ ID NO: 2718 - RNA, 19 nt, Artificial Sequence
  Synthetic siNA antisense region
aacuaccaccaucacagcc

SEQ ID NO: 2719 - RNA, 19 nt, Artificial Sequence
  Synthetic siNA antisense region
caugcuuauucacauacaa

SEQ ID NO: 2720 - RNA, 19 nt, Artificial Sequence
  Synthetic siNA antisense region
aagcuggaguguggaaugc

SEQ ID NO: 2721 - RNA, 19 nt, Artificial Sequence
  Synthetic siNA antisense region
uaaaugcacuuuuaucgaa

SEQ ID NO: 2722 - RNA, 19 nt, Artificial Sequence
  Synthetic siNA antisense region
gcaauugcuuuaaauuagu

SEQ ID NO: 2723 - RNA, 19 nt, Artificial Sequence
  Synthetic siNA antisense region
cagaauaguaaaagaaagg

SEQ ID NO: 2724 - RNA, 19 nt, Artificial Sequence
  Synthetic siNA antisense region
gagacucacaaggacuauc

SEQ ID NO: 2725 - RNA, 19 nt, Artificial Sequence
  Synthetic siNA antisense region
acacuacuuguuugccaug

SEQ ID NO: 2726 - RNA, 19 nt, Artificial Sequence
  Synthetic siNA antisense region
gaacauaaucaauauccga

SEQ ID NO: 2727 - RNA, 19 nt, Artificial Sequence
  Synthetic siNA antisense region
acguagcagauuugagugg

SEQ ID NO: 2728 - RNA, 19 nt, Artificial Sequence
  Synthetic siNA antisense region
aauugcaucguguaauaca

SEQ ID NO: 2729 - RNA, 19 nt, Artificial Sequence
  Synthetic siNA antisense region
ugcaaacagcaccaccuaa

SEQ ID NO: 2730 - RNA, 19 nt, Artificial Sequence
  Synthetic siNA antisense region
acucauuugcauggugucu

SEQ ID NO: 2731 - RNA, 19 nt, Artificial Sequence
  Synthetic siNA antisense region
cauccaaguacugucggua

SEQ ID NO: 2732 - RNA, 19 nt, Artificial Sequence
  Synthetic siNA antisense region
aaaucaucauauuauaugc

SEQ ID NO: 2733 - RNA, 19 nt, Artificial Sequence
  Synthetic siNA antisense region
auaggcuaaauccagcaga

SEQ ID NO: 2734 - RNA, 19 nt, Artificial Sequence
  Synthetic siNA antisense region
caaauuguuuguaaaucca

SEQ ID NO: 2735 - RNA, 19 nt, Artificial Sequence
  Synthetic siNA antisense region
uccacagguuauaaguauc

SEQ ID NO: 2736 - RNA, 19 nt, Artificial Sequence
  Synthetic siNA antisense region
guaaccugguaaauguauu

SEQ ID NO: 2737 - RNA, 19 nt, Artificial Sequence
  Synthetic siNA antisense region
ccacauuuucuaaacucug

SEQ ID NO: 2738 - RNA, 19 nt, Artificial Sequence
  Synthetic siNA antisense region
uauuaacaacauuauaagc

SEQ ID NO: 2739 - RNA, 19 nt, Artificial Sequence
  Synthetic siNA antisense region
guccaucaaaguguccuuu

SEQ ID NO: 2740 - RNA, 19 nt, Artificial Sequence
  Synthetic siNA antisense region
caggugcuucgccggcgug

SEQ ID NO: 2741 - RNA, 19 nt, Artificial Sequence
  Synthetic siNA antisense region
cauuauuaaugauggaaac

SEQ ID NO: 2742 - RNA, 19 nt, Artificial Sequence
  Synthetic siNA antisense region
cuaccuuuguguaaacagc

SEQ ID NO: 2743 - RNA, 19 nt, Artificial Sequence
  Synthetic siNA antisense region
ucuccacaucaauaccauc

SEQ ID NO: 2744 - RNA, 19 nt, Artificial Sequence
  Synthetic siNA antisense region
uugucuuauuuucaaagau

SEQ ID NO: 2745 - RNA, 19 nt, Artificial Sequence
  Synthetic siNA antisense region
caacauuaacaggaagugu

SEQ ID NO: 2746 - RNA, 19 nt, Artificial Sequence
  Synthetic siNA antisense region
uagcccaaagcucaaaugc

SEQ ID NO: 2747 - RNA, 19 nt, Artificial Sequence
  Synthetic siNA antisense region
cugguuuaauguuacgcuu

SEQ ID NO: 2748 - RNA, 19 nt, Artificial Sequence
  Synthetic siNA antisense region
guaucuuaaucucuggcac

SEQ ID NO: 2749 - RNA, 19 nt, Artificial Sequence
  Synthetic siNA antisense region
caacacccaaauuauugag

SEQ ID NO: 2750 - RNA, 19 nt, Artificial Sequence
  Synthetic siNA antisense region
caguauuagcagcgauauc

SEQ ID NO: 2751 - RNA, 19 nt, Artificial Sequence
  Synthetic siNA antisense region
uuuuguagucccagauuac

SEQ ID NO: 2752 - RNA, 19 nt, Artificial Sequence
  Synthetic siNA antisense region
caugugcuggggcuucucu

SEQ ID NO: 2753 - RNA, 19 nt, Artificial Sequence
  Synthetic siNA antisense region
agacaccuauuguagauac

SEQ ID NO: 2754 - RNA, 19 nt, Artificial Sequence
  Synthetic siNA antisense region
caaugucagucauugugca

SEQ ID NO: 2755 - RNA, 19 nt, Artificial Sequence
  Synthetic siNA antisense region
ucucaguagguuucuuggc

SEQ ID NO: 2756 - RNA, 19 nt, Artificial Sequence
  Synthetic siNA antisense region
uaagugaagaacaagcacu

SEQ ID NO: 2757 - RNA, 19 nt, Artificial Sequence
  Synthetic siNA antisense region
uaccaucaaacaagacagu

SEQ ID NO: 2758 - RNA, 19 nt, Artificial Sequence
  Synthetic siNA antisense region
cuaccuguccuuccacucu

SEQ ID NO: 2759 - RNA, 19 nt, Artificial Sequence
  Synthetic siNA antisense region
gggcguuucuaaaaagguc

SEQ ID NO: 2760 - RNA, 19 nt, Artificial Sequence
  Synthetic siNA antisense region
uuauuaaaacaccauuacg

SEQ ID NO: 2761 - RNA, 19 nt, Artificial Sequence
  Synthetic siNA antisense region
cuuugacugaaccuucugu

SEQ ID NO: 2762 - RNA, 19 nt, Artificial Sequence
  Synthetic siNA antisense region
ccuuugaagguguuagacc

SEQ ID NO: 2763 - RNA, 19 nt, Artificial Sequence
  Synthetic siNA antisense region
cgcuagcuugugcuggucc

SEQ ID NO: 2764 - RNA, 19 nt, Artificial Sequence
  Synthetic siNA antisense region
uuaaugugacuccauugac

SEQ ID NO: 2765 - RNA, 19 nt, Artificial Sequence
  Synthetic siNA antisense region
uuuuuacugauucuccaau

SEQ ID NO: 2766 - RNA, 19 nt, Artificial Sequence
  Synthetic siNA antisense region
uaaaguaguuaaacugugu

SEQ ID NO: 2767 - RNA, 19 nt, Artificial Sequence
  Synthetic siNA antisense region
uaaugccgucuacuuucuu

SEQ ID NO: 2768 - RNA, 19 nt, Artificial Sequence
  Synthetic siNA antisense region
uuucaggcaacuguugaau

SEQ ID NO: 2769 - RNA, 19 nt, Artificial Sequence
  Synthetic siNA antisense region
ugcucugaguaaaguaggu

SEQ ID NO: 2770 - RNA, 19 nt, Artificial Sequence
  Synthetic siNA antisense region
uaaaauccucuaagucucu

SEQ ID NO: 2771 - RNA, 19 nt, Artificial Sequence
  Synthetic siNA antisense region
ccauuugugaucugggcuu

SEQ ID NO: 2772 - RNA, 19 nt, Artificial Sequence
  Synthetic siNA antisense region
gcucgagaaagucaguuuc

SEQ ID NO: 2773 - RNA, 19 nt, Artificial Sequence
  Synthetic siNA antisense region
ugaauucauccauagcgag

SEQ ID NO: 2774 - RNA, 19 nt, Artificial Sequence
  Synthetic siNA antisense region
cgagcuuauaucgcuguau

SEQ ID NO: 2775 - RNA, 19 nt, Artificial Sequence
  Synthetic siNA antisense region
guucgaaggcauagcccuc

SEQ ID NO: 2776 - RNA, 19 nt, Artificial Sequence
  Synthetic siNA antisense region
aaucuccauaaacgaugug

SEQ ID NO: 2777 - RNA, 19 nt, Artificial Sequence
  Synthetic siNA antisense region
caaguuguccaugacugaa

SEQ ID NO: 2778 - RNA, 19 nt, Artificial Sequence
  Synthetic siNA antisense region
ucauuaaaugaagaccgcc

SEQ ID NO: 2779 - RNA, 19 nt, Artificial Sequence
  Synthetic siNA antisense region
agcgcuuggcuaagccuau

SEQ ID NO: 2780 - RNA, 19 nt, Artificial Sequence
  Synthetic siNA antisense region
uaaguggugaaucuuguga

SEQ ID NO: 2781 - RNA, 19 nt, Artificial Sequence
  Synthetic siNA antisense region
ggauaaaauccucuaauuu

SEQ ID NO: 2782 - RNA, 19 nt, Artificial Sequence
  Synthetic siNA antisense region
ucacugugcuguccauagg

SEQ ID NO: 2783 - RNA, 19 nt, Artificial Sequence
  Synthetic siNA antisense region
cuguuaugaaguaauuuuu

SEQ ID NO: 2784 - RNA, 19 nt, Artificial Sequence
  Synthetic siNA antisense region
augaaccuguuugcgcauc

SEQ ID NO: 2785 - RNA, 19 nt, Artificial Sequence
  Synthetic siNA antisense region
cagaacacacacauuuuga

SEQ ID NO: 2786 - RNA, 19 nt, Artificial Sequence
  Synthetic siNA antisense region
caaguaaaagaucaaucac

SEQ ID NO: 2787 - RNA, 19 nt, Artificial Sequence
  Synthetic siNA antisense region
uuaucucgacaaagucauc

SEQ ID NO: 2788 - RNA, 19 nt, Artificial Sequence
  Synthetic siNA antisense region
acaaaucuugugacuuuau

SEQ ID NO: 2789 - RNA, 19 nt, Artificial Sequence
  Synthetic siNA antisense region
ccacuuuugaaaucacuga

SEQ ID NO: 2790 - RNA, 19 nt, Artificial Sequence
  Synthetic siNA antisense region
agucaauuguaaccuugac

SEQ ID NO: 2791 - RNA, 19 nt, Artificial Sequence
  Synthetic siNA antisense region
ugaaugaaauuucagcaua

SEQ ID NO: 2792 - RNA, 19 nt, Artificial Sequence
  Synthetic siNA antisense region
cauccuuacaccaaagcau

SEQ ID NO: 2793 - RNA, 19 nt, Artificial Sequence
  Synthetic siNA antisense region
agaagguuucaacaugucc

SEQ ID NO: 2794 - RNA, 19 nt, Artificial Sequence
  Synthetic siNA antisense region
uugcuuguaguuuugggua

SEQ ID NO: 2795 - RNA, 19 nt, Artificial Sequence
  Synthetic siNA antisense region
cugguugccacgcucgacu

SEQ ID NO: 2796 - RNA, 19 nt, Artificial Sequence
  Synthetic siNA antisense region
aguuaggcaucgcaacacc

SEQ ID NO: 2797 - RNA, 19 nt, Artificial Sequence
  Synthetic siNA antisense region
uucuuugcaucuuguacaa

SEQ ID NO: 2798 - RNA, 19 nt, Artificial Sequence
  Synthetic siNA antisense region
cacacuuuucaagaagcau

SEQ ID NO: 2799 - RNA, 19 nt, Artificial Sequence
  Synthetic siNA antisense region
caccauaauucugaagguc

SEQ ID NO: 2800 - RNA, 19 nt, Artificial Sequence
  Synthetic siNA antisense region
uugguauaacagcauuuuc

SEQ ID NO: 2801 - RNA, 19 nt, Artificial Sequence
  Synthetic siNA antisense region
cauucaucauuauuccuuu

SEQ ID NO: 2802 - RNA, 19 nt, Artificial Sequence
  Synthetic siNA antisense region
guugaguauacuuugcgac

SEQ ID NO: 2803 - RNA, 19 nt, Artificial Sequence
  Synthetic siNA antisense region
uauuuaaguauugacacag

SEQ ID NO: 2804 - RNA, 19 nt, Artificial Sequence
  Synthetic siNA antisense region
guacagcuaaaguaagugu

SEQ ID NO: 2805 - RNA, 19 nt, Artificial Sequence
  Synthetic siNA antisense region
uaacucucauguuguaggg

SEQ ID NO: 2806 - RNA, 19 nt, Artificial Sequence
  Synthetic siNA antisense region
agccagcaccaaagugaau

SEQ ID NO: 2807 - RNA, 19 nt, Artificial Sequence
  Synthetic siNA antisense region
gugcaacuccuuuaucaga

SEQ ID NO: 2808 - RNA, 19 nt, Artificial Sequence
  Synthetic siNA antisense region
ugagcacagcuguaccugg

SEQ ID NO: 2809 - RNA, 19 nt, Artificial Sequence
  Synthetic siNA antisense region
caguuggcaaccauugucu

SEQ ID NO: 2810 - RNA, 19 nt, Artificial Sequence
  Synthetic siNA antisense region
aaucgacaaguagugugcc

SEQ ID NO: 2811 - RNA, 19 nt, Artificial Sequence
  Synthetic siNA antisense region
cgaagucauuaagaucuga

SEQ ID NO: 2812 - RNA, 19 nt, Artificial Sequence
  Synthetic siNA antisense region
uagaauaugcgucggagac

SEQ ID NO: 2813 - RNA, 19 nt, Artificial Sequence
  Synthetic siNA antisense region
cacagucuccaauuaaagu

SEQ ID NO: 2814 - RNA, 19 nt, Artificial Sequence
  Synthetic siNA antisense region
uagccguauguacuguugc

SEQ ID NO: 2815 - RNA, 19 nt, Artificial Sequence
  Synthetic siNA antisense region
uaauaaggucccauuuauu

SEQ ID NO: 2816 - RNA, 19 nt, Artificial Sequence
  Synthetic siNA antisense region
ggucauacauaucgcuaau

SEQ ID NO: 2817 - RNA, 19 nt, Artificial Sequence
  Synthetic siNA antisense region
ucacauguuugguccuagg

SEQ ID NO: 2818 - RNA, 19 nt, Artificial Sequence
  Synthetic siNA antisense region
uagagucauucucuuuugu

SEQ ID NO: 2819 - RNA, 19 nt, Artificial Sequence
  Synthetic siNA antisense region
aagugaaaaacccuucuuu

SEQ ID NO: 2820 - RNA, 19 nt, Artificial Sequence
  Synthetic siNA antisense region
uuauaaauccacacagaua

SEQ ID NO: 2821 - RNA, 19 nt, Artificial Sequence
  Synthetic siNA antisense region
ccagggcuaguuuuugcuu

SEQ ID NO: 2822 - RNA, 19 nt, Artificial Sequence
  Synthetic siNA antisense region
uuacagcuauagaaccacc

SEQ ID NO: 2823 - RNA, 19 nt, Artificial Sequence
  Synthetic siNA antisense region
aagaaugcucuguuaucuu

SEQ ID NO: 2824 - RNA, 19 nt, Artificial Sequence
  Synthetic siNA antisense region
uguaaaggucagcauucca

SEQ ID NO: 2825 - RNA, 19 nt, Artificial Sequence
  Synthetic siNA antisense region
agaaauggcccauaagcuu

SEQ ID NO: 2826 - RNA, 19 nt, Artificial Sequence
  Synthetic siNA antisense region
caaaagcuguccaccauga

SEQ ID NO: 2827 - RNA, 19 nt, Artificial Sequence
  Synthetic siNA antisense region
augcauuuacauuuguaac

SEQ ID NO: 2828 - RNA, 19 nt, Artificial Sequence
  Synthetic siNA antisense region
aaaaugcuuccgaugauga

SEQ ID NO: 2829 - RNA, 19 nt, Artificial Sequence
  Synthetic siNA antisense region
gauaguuagccccaauuaa

SEQ ID NO: 2830 - RNA, 19 nt, Artificial Sequence
  Synthetic siNA antisense region
guuccuucggcuugccaag

SEQ ID NO: 2831 - RNA, 19 nt, Artificial Sequence
  Synthetic siNA antisense region
ugguauagccaucaauuug

SEQ ID NO: 2832 - RNA, 19 nt, Artificial Sequence
  Synthetic siNA antisense region
aaauguaguuagcaugcau

SEQ ID NO: 2833 - RNA, 19 nt, Artificial Sequence
  Synthetic siNA antisense region
gauuuguguuccuccagaa

SEQ ID NO: 2834 - RNA, 19 nt, Artificial Sequence
  Synthetic siNA antisense region
aggaagacaacuggauagg

SEQ ID NO: 2835 - RNA, 19 nt, Artificial Sequence
  Synthetic siNA antisense region
ucaugucaaagagugaaua

SEQ ID NO: 2836 - RNA, 19 nt, Artificial Sequence
  Synthetic siNA antisense region
auuuaagaggaaauuugcu

SEQ ID NO: 2837 - RNA, 19 nt, Artificial Sequence
  Synthetic siNA antisense region
uuacagcaguuccucuuaa

SEQ ID NO: 2838 - RNA, 19 nt, Artificial Sequence
  Synthetic siNA antisense region
gauucuccuuaagagacau

SEQ ID NO: 2839 - RNA, 19 nt, Artificial Sequence
  Synthetic siNA antisense region
aaaucauaucauugauuug

SEQ ID NO: 2840 - RNA, 19 nt, Artificial Sequence
  Synthetic siNA antisense region
cuuuuuccagaagagaaua

SEQ ID NO: 2841 - RNA, 19 nt, Artificial Sequence
  Synthetic siNA antisense region
cucuaaugauaagccuacc

SEQ ID NO: 2842 - RNA, 19 nt, Artificial Sequence
  Synthetic siNA antisense region
ccacaacucuguuguuuuc

SEQ ID NO: 2843 - RNA, 19 nt, Artificial Sequence
  Synthetic siNA antisense region
caagaauaucacuugaaac

SEQ ID NO: 2844 - RNA, 19 nt, Artificial Sequence
  Synthetic siNA antisense region
uguucguuuaguuguuaac

SEQ ID NO: 2845 - RNA, 19 nt, Artificial Sequence
  Synthetic siNA antisense region
auaauaagaaaauaaacau

SEQ ID NO: 2846 - RNA, 19 nt, Artificial Sequence
  Synthetic siNA antisense region
cacuagugagaguaagaaa

SEQ ID NO: 2847 - RNA, 19 nt, Artificial Sequence
  Synthetic siNA antisense region
accggucaaggucacuacc

SEQ ID NO: 2848 - RNA, 19 nt, Artificial Sequence
  Synthetic siNA antisense region
caucaucaaaaguggugca

SEQ ID NO: 2849 - RNA, 19 nt, Artificial Sequence
  Synthetic siNA antisense region
uguaauuaggagcuugaac

SEQ ID NO: 2850 - RNA, 19 nt, Artificial Sequence
  Synthetic siNA antisense region
uagaugaaguauguugagu

SEQ ID NO: 2851 - RNA, 19 nt, Artificial Sequence
  Synthetic siNA antisense region
gauaguaaaccccccucau

SEQ ID NO: 2852 - RNA, 19 nt, Artificial Sequence
  Synthetic siNA antisense region
aucuaaaaauuucaucagg

SEQ ID NO: 2853 - RNA, 19 nt, Artificial Sequence
  Synthetic siNA antisense region
uuaaauaaagagugucuga

SEQ ID NO: 2854 - RNA, 19 nt, Artificial Sequence
  Synthetic siNA antisense region
gaagaaauaaauccugagu

SEQ ID NO: 2855 - RNA, 19 nt, Artificial Sequence
  Synthetic siNA antisense region
uaacauuagaauaaaaugg

SEQ ID NO: 2856 - RNA, 19 nt, Artificial Sequence
  Synthetic siNA antisense region
uaauaguaugaaacccugu

SEQ ID NO: 2857 - RNA, 19 nt, Artificial Sequence
  Synthetic siNA antisense region
gguugccaaacguaugauu

SEQ ID NO: 2858 - RNA, 19 nt, Artificial Sequence
  Synthetic siNA antisense region
ccuuaaaagguaugacagg

SEQ ID NO: 2859 - RNA, 19 nt, Artificial Sequence
  Synthetic siNA antisense region
cagcaaaauaaauaccauc

SEQ ID NO: 2860 - RNA, 19 nt, Artificial Sequence
  Synthetic siNA antisense region
cauuugauuucucuguggc

SEQ ID NO: 2861 - RNA, 19 nt, Artificial Sequence
  Synthetic siNA antisense region
aaacccaaccacggacaac

SEQ ID NO: 2862 - RNA, 19 nt, Artificial Sequence
  Synthetic siNA antisense region
uguucaugguagaaccaaa

SEQ ID NO: 2863 - RNA, 19 nt, Artificial Sequence
  Synthetic siNA antisense region
ucaccgacugugacuuguu

SEQ ID NO: 2864 - RNA, 19 nt, Artificial Sequence
  Synthetic siNA antisense region
uagaauuguuaauaauaau

SEQ ID NO: 2865 - RNA, 19 nt, Artificial Sequence
  Synthetic siNA antisense region
cucguauaacaacauuagu

SEQ ID NO: 2866 - RNA, 19 nt, Artificial Sequence
  Synthetic siNA antisense region
acaauucaaaguuacaugc

SEQ ID NO: 2867 - RNA, 19 nt, Artificial Sequence
  Synthetic siNA antisense region
caaagaaaggguugucaca

SEQ ID NO: 2868 - RNA, 19 nt, Artificial Sequence
  Synthetic siNA antisense region
ccauggguuuagaaacagc

SEQ ID NO: 2869 - RNA, 19 nt, Artificial Sequence
  Synthetic siNA antisense region
uaguaugugucuguguacc

SEQ ID NO: 2870 - RNA, 19 nt, Artificial Sequence
  Synthetic siNA antisense region
augcauuaucgaauaucau

SEQ ID NO: 2871 - RNA, 19 nt, Artificial Sequence
  Synthetic siNA antisense region
acucgaaagugcaauuaaa

SEQ ID NO: 2872 - RNA, 19 nt, Artificial Sequence
  Synthetic siNA antisense region
aaaaggcaucagauaugua

SEQ ID NO: 2873 - RNA, 19 nt, Artificial Sequence
  Synthetic siNA antisense region
uuucugaaacaucaagcga

SEQ ID NO: 2874 - RNA, 19 nt, Artificial Sequence
  Synthetic siNA antisense region
guuuaaaauuaccugacuu

SEQ ID NO: 2875 - RNA, 19 nt, Artificial Sequence
  Synthetic siNA antisense region
acacaaacucucguaagug

SEQ ID NO: 2876 - RNA, 19 nt, Artificial Sequence
  Synthetic siNA antisense region
acccaucuuuauuuuuaaa

SEQ ID NO: 2877 - RNA, 19 nt, Artificial Sequence
  Synthetic siNA antisense region
ccuuauaaacauagagaaa

SEQ ID NO: 2878 - RNA, 19 nt, Artificial Sequence
  Synthetic siNA antisense region
caucuauagguugauagcc

SEQ ID NO: 2879 - RNA, 19 nt, Artificial Sequence
  Synthetic siNA antisense region
aagguagaucacgaacuac

SEQ ID NO: 2880 - RNA, 19 nt, Artificial Sequence
  Synthetic siNA antisense region
ucaaaguguuaaaaccaga

SEQ ID NO: 2881 - RNA, 19 nt, Artificial Sequence
  Synthetic siNA antisense region
gcaacuuaaaaauagguuu

SEQ ID NO: 2882 - RNA, 19 nt, Artificial Sequence
  Synthetic siNA antisense region
uaauguuaauaccaagagg

SEQ ID NO: 2883 - RNA, 19 nt, Artificial Sequence
  Synthetic siNA antisense region
gaauggcucuaaaauuugu

SEQ ID NO: 2884 - RNA, 19 nt, Artificial Sequence
  Synthetic siNA antisense region
caggugaaaaggcuguaag

SEQ ID NO: 2885 - RNA, 19 nt, Artificial Sequence
  Synthetic siNA antisense region
ugccccaaaugucuugagc

SEQ ID NO: 2886 - RNA, 19 nt, Artificial Sequence
  Synthetic siNA antisense region
aauaggcugcagcugacgu

SEQ ID NO: 2887 - RNA, 19 nt, Artificial Sequence
  Synthetic siNA antisense region
gcuuuaaauagccaacaaa

SEQ ID NO: 2888 - RNA, 19 nt, Artificial Sequence
  Synthetic siNA antisense region
ugagcauaaauguaguugg

SEQ ID NO: 2889 - RNA, 19 nt, Artificial Sequence
  Synthetic siNA antisense region
uaccauuuucaucauacuu

SEQ ID NO: 2890 - RNA, 19 nt, Artificial Sequence
  Synthetic siNA antisense region
caacagcaucugugauugu

SEQ ID NO: 2891 - RNA, 19 nt, Artificial Sequence
  Synthetic siNA antisense region
guggauuuugagaacaauc

SEQ ID NO: 2892 - RNA, 19 nt, Artificial Sequence
  Synthetic siNA antisense region
agcauuugaguucagcaag

SEQ ID NO: 2893 - RNA, 19 nt, Artificial Sequence
  Synthetic siNA antisense region
ucucaaagcucuuaacaga

SEQ ID NO: 2894 - RNA, 19 nt, Artificial Sequence
  Synthetic siNA antisense region
gguaaauuccuuugucaau

SEQ ID NO: 2895 - RNA, 19 nt, Artificial Sequence
  Synthetic siNA antisense region
cccugaaauuagaggucug

SEQ ID NO: 2896 - RNA, 19 nt, Artificial Sequence
  Synthetic siNA antisense region
caucuccugagggaacaac

SEQ ID NO: 2897 - RNA, 19 nt, Artificial Sequence
  Synthetic siNA antisense region
uauuagggaaucucacaac

SEQ ID NO: 2898 - RNA, 19 nt, Artificial Sequence
  Synthetic siNA antisense region
aaggacacaaguuuguaau

SEQ ID NO: 2899 - RNA, 19 nt, Artificial Sequence
  Synthetic siNA antisense region
cauuaaaaaccucuccaaa

SEQ ID NO: 2900 - RNA, 19 nt, Artificial Sequence
  Synthetic siNA antisense region
cagaagggaauuuaguagc

SEQ ID NO: 2901 - RNA, 19 nt, Artificial Sequence
  Synthetic siNA antisense region
uucucucccaugcauagac

SEQ ID NO: 2902 - RNA, 19 nt, Artificial Sequence
  Synthetic siNA antisense region
cacaauuagaaauuuuuuu

SEQ ID NO: 2903 - RNA, 19 nt, Artificial Sequence
  Synthetic siNA antisense region
gcacagaguaaucagcaac

SEQ ID NO: 2904 - RNA, 19 nt, Artificial Sequence
  Synthetic siNA antisense region
aaaauguugaguuguagag

SEQ ID NO: 2905 - RNA, 19 nt, Artificial Sequence
  Synthetic siNA antisense region
agcacuuaaagguugaaaa

SEQ ID NO: 2906 - RNA, 19 nt, Artificial Sequence
  Synthetic siNA antisense region
uaguggcagaaacgccaua

SEQ ID NO: 2907 - RNA, 19 nt, Artificial Sequence
  Synthetic siNA antisense region
agcaaagaucauucaacuu

SEQ ID NO: 2908 - RNA, 19 nt, Artificial Sequence
  Synthetic siNA antisense region
cugcauagacauuggagaa

SEQ ID NO: 2909 - RNA, 19 nt, Artificial Sequence
  Synthetic siNA antisense region
ccuugacuacaaaagaauc

SEQ ID NO: 2910 - RNA, 19 nt, Artificial Sequence
  Synthetic siNA antisense region
uuugucuuacaucaucucc

SEQ ID NO: 2911 - RNA, 19 nt, Artificial Sequence
  Synthetic siNA antisense region
caguuuguccuggcgcuau

SEQ ID NO: 2912 - RNA, 19 nt, Artificial Sequence
  Synthetic siNA antisense region
uauaaucagcaauaacacc

SEQ ID NO: 2913 - RNA, 19 nt, Artificial Sequence
  Synthetic siNA antisense region
caucuggcaauuuauaauu

SEQ ID NO: 2914 - RNA, 19 nt, Artificial Sequence
  Synthetic siNA antisense region
ggacacaacccaugaaauc

SEQ ID NO: 2915 - RNA, 19 nt, Artificial Sequence
  Synthetic siNA antisense region
uccuaguauuccaagcaag

SEQ ID NO: 2916 - RNA, 19 nt, Artificial Sequence
  Synthetic siNA antisense region
uugaaguagcaucaauguu

SEQ ID NO: 2917 - RNA, 19 nt, Artificial Sequence
  Synthetic siNA antisense region
uauaauuauaauuaccagu

SEQ ID NO: 2918 - RNA, 19 nt, Artificial Sequence
  Synthetic siNA antisense region
gucuaagauaccuauauuu

SEQ ID NO: 2919 - RNA, 19 nt, Artificial Sequence
  Synthetic siNA antisense region
agggccuaagcuugccaug

SEQ ID NO: 2920 - RNA, 19 nt, Artificial Sequence
  Synthetic siNA antisense region
uagauaugucucucucaaa

SEQ ID NO: 2921 - RNA, 19 nt, Artificial Sequence
  Synthetic siNA antisense region
caggggagaaaggcacauu

SEQ ID NO: 2922 - RNA, 19 nt, Artificial Sequence
  Synthetic siNA antisense region
gggugcaagguuugccauc

SEQ ID NO: 2923 - RNA, 19 nt, Artificial Sequence
  Synthetic siNA antisense region
aacaauuaagagcaggugg

SEQ ID NO: 2924 - RNA, 19 nt, Artificial Sequence
  Synthetic siNA antisense region
aaucauuuaauggccaaua

SEQ ID NO: 2925 - RNA, 19 nt, Artificial Sequence
  Synthetic siNA antisense region
uagugguguaaaaaccaua

SEQ ID NO: 2926 - RNA, 19 nt, Artificial Sequence
  Synthetic siNA antisense region
guugguagccaaugccagu

SEQ ID NO: 2927 - RNA, 19 nt, Artificial Sequence
  Synthetic siNA antisense region
guacuacaacucuguaagg

SEQ ID NO: 2928 - RNA, 19 nt, Artificial Sequence
  Synthetic siNA antisense region
uuaaaaguucaaaagaaag

SEQ ID NO: 2929 - RNA, 19 nt, Artificial Sequence
  Synthetic siNA antisense region
aaaccguggccggugcauu

SEQ ID NO: 2930 - RNA, 19 nt, Artificial Sequence
  Synthetic siNA antisense region
uggauaauuuugguccaca

SEQ ID NO: 2931 - RNA, 19 nt, Artificial Sequence
  Synthetic siNA antisense region
gguucuuaauaaggucagu

SEQ ID NO: 2932 - RNA, 19 nt, Artificial Sequence
  Synthetic siNA antisense region
aauuaaaauugacacacug

SEQ ID NO: 2933 - RNA, 19 nt, Artificial Sequence
  Synthetic siNA antisense region
uaccagugaguccauuaaa

SEQ ID NO: 2934 - RNA, 19 nt, Artificial Sequence
  Synthetic siNA antisense region
aaggaguuaacacaccagu

SEQ ID NO: 2935 - RNA, 19 nt, Artificial Sequence
  Synthetic siNA antisense region
guugaaaucucuuugaaga

SEQ ID NO: 2936 - RNA, 19 nt, Artificial Sequence
  Synthetic siNA antisense region
ggccaaauuguugaaaugg

SEQ ID NO: 2937 - RNA, 19 nt, Artificial Sequence
  Synthetic siNA antisense region
ugaaaucagaaacaucacg

SEQ ID NO: 2938 - RNA, 19 nt, Artificial Sequence
  Synthetic siNA antisense region
gaucucgaacggaaucagu

SEQ ID NO: 2939 - RNA, 19 nt, Artificial Sequence
  Synthetic siNA antisense region
auauuucagauguuuuagg

SEQ ID NO: 2940 - RNA, 19 nt, Artificial Sequence
  Synthetic siNA antisense region
cgcaaggugaaaugucuaa

SEQ ID NO: 2941 - RNA, 19 nt, Artificial Sequence
  Synthetic siNA antisense region
cacuuacacccccaaaagc

SEQ ID NO: 2942 - RNA, 19 nt, Artificial Sequence
  Synthetic siNA antisense region
uuguuccagguguaauuac

SEQ ID NO: 2943 - RNA, 19 nt, Artificial Sequence
  Synthetic siNA antisense region
caacuucagaugaagcauu

SEQ ID NO: 2944 - RNA, 19 nt, Artificial Sequence
  Synthetic siNA antisense region
caucuugauauagaacagc

SEQ ID NO: 2945 - RNA, 19 nt, Artificial Sequence
  Synthetic siNA antisense region
aaacaucagugcaguuaac

SEQ ID NO: 2946 - RNA, 19 nt, Artificial Sequence
  Synthetic siNA antisense region
cugcaugaauugcuguaga

SEQ ID NO: 2947 - RNA, 19 nt, Artificial Sequence
  Synthetic siNA antisense region
aagcuggugugaguugauc

SEQ ID NO: 2948 - RNA, 19 nt, Artificial Sequence
  Synthetic siNA antisense region
caguagaauauaugcgcca

SEQ ID NO: 2949 - RNA, 19 nt, Artificial Sequence
  Synthetic siNA antisense region
ucuggaauacauuguuucc

SEQ ID NO: 2950 - RNA, 19 nt, Artificial Sequence
  Synthetic siNA antisense region
uaagacagccugcuugagu

SEQ ID NO: 2951 - RNA, 19 nt, Artificial Sequence
  Synthetic siNA antisense region
cgacaugcucagcuccuau

SEQ ID NO: 2952 - RNA, 19 nt, Artificial Sequence
  Synthetic siNA antisense region
cgcacucauaagaaguguc

SEQ ID NO: 2953 - RNA, 19 nt, Artificial Sequence
  Synthetic siNA antisense region
cagcuccaauaggaauguc

SEQ ID NO: 2954 - RNA, 19 nt, Artificial Sequence
  Synthetic siNA antisense region
gguaacuagcacaaaugcc

SEQ ID NO: 2955 - RNA, 19 nt, Artificial Sequence
  Synthetic siNA antisense region
guaauaaagaaacuguaug

SEQ ID NO: 2956 - RNA, 19 nt, Artificial Sequence
  Synthetic siNA antisense region
auuuuuggcuaguacuacg

SEQ ID NO: 2957 - RNA, 19 nt, Artificial Sequence
  Synthetic siNA antisense region
uaguauaagccacaauaga

SEQ ID NO: 2958 - RNA, 19 nt, Artificial Sequence
  Synthetic siNA antisense region
uaucagcaccuaaagacau

SEQ ID NO: 2959 - RNA, 19 nt, Artificial Sequence
  Synthetic siNA antisense region
uagaguaagcaauugaacu

SEQ ID NO: 2960 - RNA, 19 nt, Artificial Sequence
  Synthetic siNA antisense region
guauagcaaugguguuauu

SEQ ID NO: 2961 - RNA, 19 nt, Artificial Sequence
  Synthetic siNA antisense region
uaauugaaaaguuaguagg

SEQ ID NO: 2962 - RNA, 19 nt, Artificial Sequence
  Synthetic siNA antisense region
uuacuucuguaguaaugcu

SEQ ID NO: 2963 - RNA, 19 nt, Artificial Sequence
  Synthetic siNA antisense region
uagccauagaaacaggcau

SEQ ID NO: 2964 - RNA, 19 nt, Artificial Sequence
  Synthetic siNA antisense region
uacaaucuacggagguuuu

SEQ ID NO: 2965 - RNA, 19 nt, Artificial Sequence
  Synthetic siNA antisense region
cuccgcagauguacauauu

SEQ ID NO: 2966 - RNA, 19 nt, Artificial Sequence
  Synthetic siNA antisense region
uagcacauucaguagaauc

SEQ ID NO: 2967 - RNA, 19 nt, Artificial Sequence
  Synthetic siNA antisense region
cauauuggagaagcaaauu

SEQ ID NO: 2968 - RNA, 19 nt, Artificial Sequence
  Synthetic siNA antisense region
guugugugcaaaagcuacc

SEQ ID NO: 2969 - RNA, 19 nt, Artificial Sequence
  Synthetic siNA antisense region
cugagagugcacgauuuag

SEQ ID NO: 2970 - RNA, 19 nt, Artificial Sequence
  Synthetic siNA antisense region
ccuguucagcagcaauacc

SEQ ID NO: 2971 - RNA, 19 nt, Artificial Sequence
  Synthetic siNA antisense region
cuucacguguguugcgauc

SEQ ID NO: 2972 - RNA, 19 nt, Artificial Sequence
  Synthetic siNA antisense region
guuugacuugagcgaacac

SEQ ID NO: 2973 - RNA, 19 nt, Artificial Sequence
  Synthetic siNA antisense region
uugggguuuuguacauuug

SEQ ID NO: 2974 - RNA, 19 nt, Artificial Sequence
  Synthetic siNA antisense region
caccaaaauauuucaaagu

SEQ ID NO: 2975 - RNA, 19 nt, Artificial Sequence
  Synthetic siNA antisense region
uuugugaaaaauuaaaacc

SEQ ID NO: 2976 - RNA, 19 nt, Artificial Sequence
  Synthetic siNA antisense region
uuagagggucagguaauau

SEQ ID NO: 2977 - RNA, 19 nt, Artificial Sequence
  Synthetic siNA antisense region
aagaccucuuaguuggcuu

SEQ ID NO: 2978 - RNA, 19 nt, Artificial Sequence
  Synthetic siNA antisense region
agagcaaguccucaauaaa

SEQ ID NO: 2979 - RNA, 19 nt, Artificial Sequence
  Synthetic siNA antisense region
cgagugucaccuuauuaaa

SEQ ID NO: 2980 - RNA, 19 nt, Artificial Sequence
  Synthetic siNA antisense region
ucaugaagccagcaucagc

SEQ ID NO: 2981 - RNA, 19 nt, Artificial Sequence
  Synthetic siNA antisense region
ggcauucgccauauugcuu

SEQ ID NO: 2982 - RNA, 19 nt, Artificial Sequence
  Synthetic siNA antisense region
uagcauuaauaucaccuag

SEQ ID NO: 2983 - RNA, 19 nt, Artificial Sequence
  Synthetic siNA antisense region
gcgcacaaaugagaucucu

SEQ ID NO: 2984 - RNA, 19 nt, Artificial Sequence
  Synthetic siNA antisense region
uaaguccauugaacuucug

SEQ ID NO: 2985 - RNA, 19 nt, Artificial Sequence
  Synthetic siNA antisense region
gcagagguggcaacacugu

SEQ ID NO: 2986 - RNA, 19 nt, Artificial Sequence
  Synthetic siNA antisense region
caaucauaucaucagugag

SEQ ID NO: 2987 - RNA, 19 nt, Artificial Sequence
  Synthetic siNA antisense region
gagcagcaguguaggcagc

SEQ ID NO: 2988 - RNA, 19 nt, Artificial Sequence
  Synthetic siNA antisense region
uggcaguaccacuaacuag

SEQ ID NO: 2989 - RNA, 19 nt, Artificial Sequence
  Synthetic siNA antisense region
caaauguccauccagcagu

SEQ ID NO: 2990 - RNA, 19 nt, Artificial Sequence
  Synthetic siNA antisense region
gaagagcagcgccagcacc

SEQ ID NO: 2991 - RNA, 19 nt, Artificial Sequence
  Synthetic siNA antisense region
gcauagcaaaagguauuug

SEQ ID NO: 2992 - RNA, 19 nt, Artificial Sequence
  Synthetic siNA antisense region
ugaaccuauaugccauuug

SEQ ID NO: 2993 - RNA, 19 nt, Artificial Sequence
  Synthetic siNA antisense region
ggguaacuccaaugccauu

SEQ ID NO: 2994 - RNA, 19 nt, Artificial Sequence
  Synthetic siNA antisense region
ucucauagagaacauuuug

SEQ ID NO: 2995 - RNA, 19 nt, Artificial Sequence
  Synthetic siNA antisense region
uggcgauuuguuuuugguu

SEQ ID NO: 2996 - RNA, 19 nt, Artificial Sequence
  Synthetic siNA antisense region
ucgccuuguuaaauugguu

SEQ ID NO: 2997 - RNA, 19 nt, Artificial Sequence
  Synthetic siNA antisense region
auucuugaauuugacuaau

SEQ ID NO: 2998 - RNA, 19 nt, Artificial Sequence
  Synthetic siNA antisense region
uugauguuguuguaaguga

SEQ ID NO: 2999 - RNA, 19 nt, Artificial Sequence
  Synthetic siNA antisense region
gcagcuugcccaaugcagu

SEQ ID NO: 3000 - RNA, 19 nt, Artificial Sequence
  Synthetic siNA antisense region
ucugguuaacaacgucuug

SEQ ID NO: 3001 - RNA, 19 nt, Artificial Sequence
  Synthetic siNA antisense region
uguuuaaugcuugagcauu

SEQ ID NO: 3002 - RNA, 19 nt, Artificial Sequence
  Synthetic siNA antisense region
uaaguuguuuaacaagugu

SEQ ID NO: 3003 - RNA, 19 nt, Artificial Sequence
  Synthetic siNA antisense region
uugcaccaaaauuagagcu

SEQ ID NO: 3004 - RNA, 19 nt, Artificial Sequence
  Synthetic siNA antisense region
cauuuagcacacuugaaau

SEQ ID NO: 3005 - RNA, 19 nt, Artificial Sequence
  Synthetic siNA antisense region
caagucgcgaaaggauauc

SEQ ID NO: 3006 - RNA, 19 nt, Artificial Sequence
  Synthetic siNA antisense region
ccuccgccucgacuuuauc

SEQ ID NO: 3007 - RNA, 19 nt, Artificial Sequence
  Synthetic siNA antisense region
uuaaccugucaauuuguac

SEQ ID NO: 3008 - RNA, 19 nt, Artificial Sequence
  Synthetic siNA antisense region
uuugaagucugccuguaau

SEQ ID NO: 3009 - RNA, 19 nt, Artificial Sequence
  Synthetic siNA antisense region
uuacauagguuugaaggcu

SEQ ID NO: 3010 - RNA, 19 nt, Artificial Sequence
  Synthetic siNA antisense region
cccugauuaguuguugugu

SEQ ID NO: 3011 - RNA, 19 nt, Artificial Sequence
  Synthetic siNA antisense region
aagcccugauuucagcagc

SEQ ID NO: 3012 - RNA, 19 nt, Artificial Sequence
  Synthetic siNA antisense region
uagcagcaagauuagcaga

SEQ ID NO: 3013 - RNA, 19 nt, Artificial Sequence
  Synthetic siNA antisense region
cacacucagacauuuuagu

SEQ ID NO: 3014 - RNA, 19 nt, Artificial Sequence
  Synthetic siNA antisense region
uuuuugauuguccaagaac

SEQ ID NO: 3015 - RNA, 19 nt, Artificial Sequence
  Synthetic siNA antisense region
uuccacaaaagucaacucu

SEQ ID NO: 3016 - RNA, 19 nt, Artificial Sequence
  Synthetic siNA antisense region
acauaaggugguagcccuu

SEQ ID NO: 3017 - RNA, 19 nt, Artificial Sequence
  Synthetic siNA antisense region
gggcugcuugugggaagga

SEQ ID NO: 3018 - RNA, 19 nt, Artificial Sequence
  Synthetic siNA antisense region
ggaagacaacaccaugcgg

SEQ ID NO: 3019 - RNA, 19 nt, Artificial Sequence
  Synthetic siNA antisense region
gcacauacgugacauguag

SEQ ID NO: 3020 - RNA, 19 nt, Artificial Sequence
  Synthetic siNA antisense region
aguuccucuccugggaugg

SEQ ID NO: 3021 - RNA, 19 nt, Artificial Sequence
  Synthetic siNA antisense region
uugcuggcgcuguggugaa

SEQ ID NO: 3022 - RNA, 19 nt, Artificial Sequence
  Synthetic siNA antisense region
cuuugccuucaugacaaau

SEQ ID NO: 3023 - RNA, 19 nt, Artificial Sequence
  Synthetic siNA antisense region
cuucacgagggaaguaugc

SEQ ID NO: 3024 - RNA, 19 nt, Artificial Sequence
  Synthetic siNA antisense region
cauuaaacacaaaaacacc

SEQ ID NO: 3025 - RNA, 19 nt, Artificial Sequence
  Synthetic siNA antisense region
uaauaaaccaagaagugcc

SEQ ID NO: 3026 - RNA, 19 nt, Artificial Sequence
  Synthetic siNA antisense region
aaaagaaguuccucugugu

SEQ ID NO: 3027 - RNA, 19 nt, Artificial Sequence
  Synthetic siNA antisense region
uaguaauuauuuguggaga

SEQ ID NO: 3028 - RNA, 19 nt, Artificial Sequence
  Synthetic siNA antisense region
agacaaauguauugucugu

SEQ ID NO: 3029 - RNA, 19 nt, Artificial Sequence
  Synthetic siNA antisense region
cgacaucacaauuuccuga

SEQ ID NO: 3030 - RNA, 19 nt, Artificial Sequence
  Synthetic siNA antisense region
uguuaaugaugccaauaac

SEQ ID NO: 3031 - RNA, 19 nt, Artificial Sequence
  Synthetic siNA antisense region
gaggaucauaaacuguguu

SEQ ID NO: 3032 - RNA, 19 nt, Artificial Sequence
  Synthetic siNA antisense region
agucaagcucagguugcag

SEQ ID NO: 3033 - RNA, 19 nt, Artificial Sequence
  Synthetic siNA antisense region
ccagcucuucuuugaauga

SEQ ID NO: 3034 - RNA, 19 nt, Artificial Sequence
  Synthetic siNA antisense region
gauuuuugaaguacuuguc

SEQ ID NO: 3035 - RNA, 19 nt, Artificial Sequence
  Synthetic siNA antisense region
caacaucuggugauguaug

SEQ ID NO: 3036 - RNA, 19 nt, Artificial Sequence
  Synthetic siNA antisense region
cugaaaugucgccaagauc

SEQ ID NO: 3037 - RNA, 19 nt, Artificial Sequence
  Synthetic siNA antisense region
cgacagaagcguuaaugcc

SEQ ID NO: 3038 - RNA, 19 nt, Artificial Sequence
  Synthetic siNA antisense region
uuucuuuuugaauguugac

SEQ ID NO: 3039 - RNA, 19 nt, Artificial Sequence
  Synthetic siNA antisense region
ccucauugaggcggucaau

SEQ ID NO: 3040 - RNA, 19 nt, Artificial Sequence
  Synthetic siNA antisense region
cauuuaaauuuuuagcgac

SEQ ID NO: 3041 - RNA, 19 nt, Artificial Sequence
  Synthetic siNA antisense region
gaaggucaaugagugauuc

SEQ ID NO: 3042 - RNA, 19 nt, Artificial Sequence
  Synthetic siNA antisense region
cauauuuucccaauucuug

SEQ ID NO: 3043 - RNA, 19 nt, Artificial Sequence
  Synthetic siNA antisense region
gccauuuaauauauugcuc

SEQ ID NO: 3044 - RNA, 19 nt, Artificial Sequence
  Synthetic siNA antisense region
cgagccaaacauaccaagg

SEQ ID NO: 3045 - RNA, 19 nt, Artificial Sequence
  Synthetic siNA antisense region
uuaguccagcaaugaagcc

SEQ ID NO: 3046 - RNA, 19 nt, Artificial Sequence
  Synthetic siNA antisense region
uaaccaugacgauggcaau

SEQ ID NO: 3047 - RNA, 19 nt, Artificial Sequence
  Synthetic siNA antisense region
ugcaacaaagcaagauugu

SEQ ID NO: 3048 - RNA, 19 nt, Artificial Sequence
  Synthetic siNA antisense region
aacugcaacaacuagucau

SEQ ID NO: 3049 - RNA, 19 nt, Artificial Sequence
  Synthetic siNA antisense region
agcaugcacccuugaggca

SEQ ID NO: 3050 - RNA, 19 nt, Artificial Sequence
  Synthetic siNA antisense region
ugcagcaagaaccacaaga

SEQ ID NO: 3051 - RNA, 19 nt, Artificial Sequence
  Synthetic siNA antisense region
agucauccucaucaaacuu

SEQ ID NO: 3052 - RNA, 19 nt, Artificial Sequence
  Synthetic siNA antisense region
ccuugagaacuggcucaga

SEQ ID NO: 3053 - RNA, 19 nt, Artificial Sequence
  Synthetic siNA antisense region
uguaauguaauuugacacc

SEQ ID NO: 3054 - RNA, 19 nt, Artificial Sequence
  Synthetic siNA antisense region
uccauaaguucguuuaugu

SEQ ID NO: 3055 - RNA, 19 nt, Artificial Sequence
  Synthetic siNA antisense region
aaaaaucucauaaacaaau

SEQ ID NO: 3056 - RNA, 19 nt, Artificial Sequence
  Synthetic siNA antisense region
guaauugauccaagaguaa

SEQ ID NO: 3057 - RNA, 19 nt, Artificial Sequence
  Synthetic siNA antisense region
auuuuuacuggcugugcag

SEQ ID NO: 3058 - RNA, 19 nt, Artificial Sequence
  Synthetic siNA antisense region
gcaggagaagcauugucaa

SEQ ID NO: 3059 - RNA, 19 nt, Artificial Sequence
  Synthetic siNA antisense region
guagcaugaacaguacuug

SEQ ID NO: 3060 - RNA, 19 nt, Artificial Sequence
  Synthetic siNA antisense region
uguagcgguaucguugcug

SEQ ID NO: 3061 - RNA, 19 nt, Artificial Sequence
  Synthetic siNA antisense region
ccgaaagggagugaggcuu

SEQ ID NO: 3062 - RNA, 19 nt, Artificial Sequence
  Synthetic siNA antisense region
acgccaauaacaagccauc

SEQ ID NO: 3063 - RNA, 19 nt, Artificial Sequence
  Synthetic siNA antisense region
aaaacagcaagaaaugcaa

SEQ ID NO: 3064 - RNA, 19 nt, Artificial Sequence
  Synthetic siNA antisense region
auuuugguagcgcucugaa

SEQ ID NO: 3065 - RNA, 19 nt, Artificial Sequence
  Synthetic siNA antisense region
cuuuuauugagcgcaauua

SEQ ID NO: 3066 - RNA, 19 nt, Artificial Sequence
  Synthetic siNA antisense region
uaaagggcuagcugccauc

SEQ ID NO: 3067 - RNA, 19 nt, Artificial Sequence
  Synthetic siNA antisense region
augaacuggaagcccuuau

SEQ ID NO: 3068 - RNA, 19 nt, Artificial Sequence
  Synthetic siNA antisense region
agcagcaguaaauugcaaa

SEQ ID NO: 3069 - RNA, 19 nt, Artificial Sequence
  Synthetic siNA antisense region
gaauagaugguaacaaaua

SEQ ID NO: 3070 - RNA, 19 nt, Artificial Sequence
  Synthetic siNA antisense region
gcgacaagcaaaagaugug

SEQ ID NO: 3071 - RNA, 19 nt, Artificial Sequence
  Synthetic siNA antisense region
ugcgccuccauaccugcag

SEQ ID NO: 3072 - RNA, 19 nt, Artificial Sequence
  Synthetic siNA antisense region
gcauagagguacaaaaauu

SEQ ID NO: 3073 - RNA, 19 nt, Artificial Sequence
  Synthetic siNA antisense region
uguagaaaauauaucaagg

SEQ ID NO: 3074 - RNA, 19 nt, Artificial Sequence
  Synthetic siNA antisense region
cuacaugcguugaugcauu

SEQ ID NO: 3075 - RNA, 19 nt, Artificial Sequence
  Synthetic siNA antisense region
caacaucucauaauaauuc

SEQ ID NO: 3076 - RNA, 19 nt, Artificial Sequence
  Synthetic siNA antisense region
uugcacuuccaacaaagcc

SEQ ID NO: 3077 - RNA, 19 nt, Artificial Sequence
  Synthetic siNA antisense region
aguaauggguucuuggauu

SEQ ID NO: 3078 - RNA, 19 nt, Artificial Sequence
  Synthetic siNA antisense region
aaguaguuggcaucauaaa

SEQ ID NO: 3079 - RNA, 19 nt, Artificial Sequence
  Synthetic siNA antisense region
ugugugugccagcaaacaa

SEQ ID NO: 3080 - RNA, 19 nt, Artificial Sequence
  Synthetic siNA antisense region
auacaguagucauaguuau

SEQ ID NO: 3081 - RNA, 19 nt, Artificial Sequence
  Synthetic siNA antisense region
gugacacuguuauauggua

SEQ ID NO: 3082 - RNA, 19 nt, Artificial Sequence
  Synthetic siNA antisense region
guaacgacaauuguaucug

SEQ ID NO: 3083 - RNA, 19 nt, Artificial Sequence
  Synthetic siNA antisense region
gaaaugccgucaccuucag

SEQ ID NO: 3084 - RNA, 19 nt, Artificial Sequence
  Synthetic siNA antisense region
ucuuugaguuuugguguug

SEQ ID NO: 3085 - RNA, 19 nt, Artificial Sequence
  Synthetic siNA antisense region
ccaccaauuugguagucuu

SEQ ID NO: 3086 - RNA, 19 nt, Artificial Sequence
  Synthetic siNA antisense region
ugccuauccucagaauaac

SEQ ID NO: 3087 - RNA, 19 nt, Artificial Sequence
  Synthetic siNA antisense region
uagucuuuaacaccugagu

SEQ ID NO: 3088 - RNA, 19 nt, Artificial Sequence
  Synthetic siNA antisense region
uagccauguacaacgacau

SEQ ID NO: 3089 - RNA, 19 nt, Artificial Sequence
  Synthetic siNA antisense region
uaguaaacuucggugaaau

SEQ ID NO: 3090 - RNA, 19 nt, Artificial Sequence
  Synthetic siNA antisense region
uguguagacucaagcuggu

SEQ ID NO: 3091 - RNA, 19 nt, Artificial Sequence
  Synthetic siNA antisense region
ccagugucuguaguaauuu

SEQ ID NO: 3092 - RNA, 19 nt, Artificial Sequence
  Synthetic siNA antisense region
aauguagcauuuucaauac

SEQ ID NO: 3093 - RNA, 19 nt, Artificial Sequence
  Synthetic siNA antisense region
agcuuguuaaagaugaaga

SEQ ID NO: 3094 - RNA, 19 nt, Artificial Sequence
  Synthetic siNA antisense region
uucggugggucuuuaacaa

SEQ ID NO: 3095 - RNA, 19 nt, Artificial Sequence
  Synthetic siNA antisense region
auuguguguauuugcacau

SEQ ID NO: 3096 - RNA, 19 nt, Artificial Sequence
  Synthetic siNA antisense region
acuccugaagagccgucga

SEQ ID NO: 3097 - RNA, 19 nt, Artificial Sequence
  Synthetic siNA antisense region
uccauugcuggauuagcaa

SEQ ID NO: 3098 - RNA, 19 nt, Artificial Sequence
  Synthetic siNA antisense region
ggcucaucauaaauuggau

SEQ ID NO: 3099 - RNA, 19 nt, Artificial Sequence
  Synthetic siNA antisense region
acgcuaguagucgucgucg

SEQ ID NO: 3100 - RNA, 19 nt, Artificial Sequence
  Synthetic siNA antisense region
ucuugugcuuacaaaggca

SEQ ID NO: 3101 - RNA, 19 nt, Artificial Sequence
  Synthetic siNA antisense region
auaaguucguacucacuuu

SEQ ID NO: 3102 - RNA, 19 nt, Artificial Sequence
  Synthetic siNA antisense region
uccgaaacgaaugaguaca

SEQ ID NO: 3103 - RNA, 19 nt, Artificial Sequence
  Synthetic siNA antisense region
auuaacguaccuguuucuu

SEQ ID NO: 3104 - RNA, 19 nt, Artificial Sequence
  Synthetic siNA antisense region
agaaguacgcuauuaacua

SEQ ID NO: 3105 - RNA, 19 nt, Artificial Sequence
  Synthetic siNA antisense region
accacgaaagcaagaaaaa

SEQ ID NO: 3106 - RNA, 19 nt, Artificial Sequence
  Synthetic siNA antisense region
agugugacuagcaagaaua

SEQ ID NO: 3107 - RNA, 19 nt, Artificial Sequence
  Synthetic siNA antisense region
agcgcaguaaggauggcua

SEQ ID NO: 3108 - RNA, 19 nt, Artificial Sequence
  Synthetic siNA antisense region
caguacgcacacaaucgaa

SEQ ID NO: 3109 - RNA, 19 nt, Artificial Sequence
  Synthetic siNA antisense region
acguuaacaauauugcagc

SEQ ID NO: 3110 - RNA, 19 nt, Artificial Sequence
  Synthetic siNA antisense region
guugguuuuacuaaacuca

SEQ ID NO: 3111 - RNA, 19 nt, Artificial Sequence
  Synthetic siNA antisense region
cgcgaguagacguaaaccg

SEQ ID NO: 3112 - RNA, 19 nt, Artificial Sequence
  Synthetic siNA antisense region
gaguucagauuuuuaacac

SEQ ID NO: 3113 - RNA, 19 nt, Artificial Sequence
  Synthetic siNA antisense region
ucaggaacuccuucagaag

SEQ ID NO: 3114 - RNA, 19 nt, Artificial Sequence
  Synthetic siNA antisense region
uucguuuagaccagaagau

SEQ ID NO: 3115 - RNA, 19 nt, Artificial Sequence
  Synthetic siNA antisense region
aauaauaauaauaguuagu

SEQ ID NO: 3116 - RNA, 19 nt, Artificial Sequence
  Synthetic siNA antisense region
uguuaaaguuccaaacaga

SEQ ID NO: 3117 - RNA, 19 nt, Artificial Sequence
  Synthetic siNA antisense region
gucugccaugauaagcaau

SEQ ID NO: 3118 - RNA, 19 nt, Artificial Sequence
  Synthetic siNA antisense region
aacgguaauaguaccguug

SEQ ID NO: 3119 - RNA, 19 nt, Artificial Sequence
  Synthetic siNA antisense region
gaguuguuuaagcuccuca

SEQ ID NO: 3120 - RNA, 19 nt, Artificial Sequence
  Synthetic siNA antisense region
uagguuccauuguuccagg

SEQ ID NO: 3121 - RNA, 19 nt, Artificial Sequence
  Synthetic siNA antisense region
gaauaggaaaccuauuacu

SEQ ID NO: 3122 - RNA, 19 nt, Artificial Sequence
  Synthetic siNA antisense region
uaacauaauccaggcuagg

SEQ ID NO: 3123 - RNA, 19 nt, Artificial Sequence
  Synthetic siNA antisense region
agaauaggcaaauuguagu

SEQ ID NO: 3124 - RNA, 19 nt, Artificial Sequence
  Synthetic siNA antisense region
caaaaaccuguuccgauua

SEQ ID NO: 3125 - RNA, 19 nt, Artificial Sequence
  Synthetic siNA antisense region
aacaagcuuuauuauguac

SEQ ID NO: 3126 - RNA, 19 nt, Artificial Sequence
  Synthetic siNA antisense region
ccacaagagccagaggaaa

SEQ ID NO: 3127 - RNA, 19 nt, Artificial Sequence
  Synthetic siNA antisense region
acaagcaaguguuacuggc

SEQ ID NO: 3128 - RNA, 19 nt, Artificial Sequence
  Synthetic siNA antisense region
gacagcagcaagcacaaaa

SEQ ID NO: 3129 - RNA, 19 nt, Artificial Sequence
  Synthetic siNA antisense region
cacccaauuaauucuguag

SEQ ID NO: 3130 - RNA, 19 nt, Artificial Sequence
  Synthetic siNA antisense region
aaucgcaaucccgccaguc

SEQ ID NO: 3131 - RNA, 19 nt, Artificial Sequence
  Synthetic siNA antisense region
uacaauacaagccauugca

SEQ ID NO: 3132 - RNA, 19 nt, Artificial Sequence
  Synthetic siNA antisense region
gcuaagccacaucaagccu

SEQ ID NO: 3133 - RNA, 19 nt, Artificial Sequence
  Synthetic siNA antisense region
gaaggaagcaacgaaguag

SEQ ID NO: 3134 - RNA, 19 nt, Artificial Sequence
  Synthetic siNA antisense region
gguacgagcaaacagccug

SEQ ID NO: 3135 - RNA, 19 nt, Artificial Sequence
  Synthetic siNA antisense region
gaaugaccacauugagcgg

SEQ ID NO: 3136 - RNA, 19 nt, Artificial Sequence
  Synthetic siNA antisense region
aauguuuguuucuggguug

SEQ ID NO: 3137 - RNA, 19 nt, Artificial Sequence
  Synthetic siNA antisense region
gagaggcacauugagaaga

SEQ ID NO: 3138 - RNA, 19 nt, Artificial Sequence
  Synthetic siNA antisense region
ggucacaauugucccccgg

SEQ ID NO: 3139 - RNA, 19 nt, Artificial Sequence
  Synthetic siNA antisense region
acuuuccaugagcggucug

SEQ ID NO: 3140 - RNA, 19 nt, Artificial Sequence
  Synthetic siNA antisense region
agcaccaaugacaaguuca

SEQ ID NO: 3141 - RNA, 19 nt, Artificial Sequence
  Synthetic siNA antisense region
gugaccacgaaugaucaca

SEQ ID NO: 3142 - RNA, 19 nt, Artificial Sequence
  Synthetic siNA antisense region
guguccggccauucgcaag

SEQ ID NO: 3143 - RNA, 19 nt, Artificial Sequence
  Synthetic siNA antisense region
gucacagcgcccuagggag

SEQ ID NO: 3144 - RNA, 19 nt, Artificial Sequence
  Synthetic siNA antisense region
uuuuggcagguccuuaaug

SEQ ID NO: 3145 - RNA, 19 nt, Artificial Sequence
  Synthetic siNA antisense region
uguagccacagugaucucu

SEQ ID NO: 3146 - RNA, 19 nt, Artificial Sequence
  Synthetic siNA antisense region
auaagaaagcguucgugau

SEQ ID NO: 3147 - RNA, 19 nt, Artificial Sequence
  Synthetic siNA antisense region
cgacgcuccuaauuuguaa

SEQ ID NO: 3148 - RNA, 19 nt, Artificial Sequence
  Synthetic siNA antisense region
aucagugccuacacgcugc

SEQ ID NO: 3149 - RNA, 19 nt, Artificial Sequence
  Synthetic siNA antisense region
guaugcagcaaaaccugaa

SEQ ID NO: 3150 - RNA, 19 nt, Artificial Sequence
  Synthetic siNA antisense region
uccaauacgguagcgguug

SEQ ID NO: 3151 - RNA, 19 nt, Artificial Sequence
  Synthetic siNA antisense region
uguauuuaauuuauaguuu

SEQ ID NO: 3152 - RNA, 19 nt, Artificial Sequence
  Synthetic siNA antisense region
guugcuaccggcguggucu

SEQ ID NO: 3153 - RNA, 19 nt, Artificial Sequence
  Synthetic siNA antisense region
uagcaaagcaauauugucg

SEQ ID NO: 3154 - RNA, 19 nt, Artificial Sequence
  Synthetic siNA antisense region
uguugucacuuacuguacu

SEQ ID NO: 3155 - RNA, 19 nt, Artificial Sequence
  Synthetic siNA antisense region
ucaacaagaugaaacaucu

SEQ ID NO: 3156 - RNA, 19 nt, Artificial Sequence
  Synthetic siNA antisense region
gcuauuguaaccuggaagu

SEQ ID NO: 3157 - RNA, 19 nt, Artificial Sequence
  Synthetic siNA antisense region
augauaaucaauaucucug

SEQ ID NO: 3158 - RNA, 19 nt, Artificial Sequence
  Synthetic siNA antisense region
auccugaaaguccucauaa

SEQ ID NO: 3159 - RNA, 19 nt, Artificial Sequence
  Synthetic siNA antisense region
ucaagauuccaaauagcaa

SEQ ID NO: 3160 - RNA, 19 nt, Artificial Sequence
  Synthetic siNA antisense region
auugaacuuauuauaacgu

SEQ ID NO: 3161 - RNA, 19 nt, Artificial Sequence
  Synthetic siNA antisense region
uuaaauaauugucucacua

SEQ ID NO: 3162 - RNA, 19 nt, Artificial Sequence
  Synthetic siNA antisense region
uucuucuuaguuagaggcu

SEQ ID NO: 3163 - RNA, 19 nt, Artificial Sequence
  Synthetic siNA antisense region
ucaucuaacuccgaauaau

SEQ ID NO: 3164 - RNA, 19 nt, Artificial Sequence
  Synthetic siNA antisense region
aacuccauagguucuucau

SEQ ID NO: 3165 - RNA, 19 nt, Artificial Sequence
  Synthetic siNA antisense region
ucguuuuauggauaaucua

SEQ ID NO: 3166 - RNA, 19 nt, Artificial Sequence
  Synthetic siNA antisense region
agagaauaauuuucauguu

SEQ ID NO: 3167 - RNA, 19 nt, Artificial Sequence
  Synthetic siNA antisense region
auacaaucaaugucaggaa

SEQ ID NO: 3168 - RNA, 19 nt, Artificial Sequence
  Synthetic siNA antisense region
auagcucgcaagauguaaa

SEQ ID NO: 3169 - RNA, 19 nt, Artificial Sequence
  Synthetic siNA antisense region
cacacuccugauagugaua

SEQ ID NO: 3170 - RNA, 19 nt, Artificial Sequence
  Synthetic siNA antisense region
guacagucguaccucuaac

SEQ ID NO: 3171 - RNA, 19 nt, Artificial Sequence
  Synthetic siNA antisense region
ggcaagguucuuuuaguag

SEQ ID NO: 3172 - RNA, 19 nt, Artificial Sequence
  Synthetic siNA antisense region
ccucguauguuccugaugg

SEQ ID NO: 3173 - RNA, 19 nt, Artificial Sequence
  Synthetic siNA antisense region
ggugaaauggugaauugcc

SEQ ID NO: 3174 - RNA, 19 nt, Artificial Sequence
  Synthetic siNA antisense region
auuuauugucagcaagagg

SEQ ID NO: 3175 - RNA, 19 nt, Artificial Sequence
  Synthetic siNA antisense region
uagugcaaguuagugcaaa

SEQ ID NO: 3176 - RNA, 19 nt, Artificial Sequence
  Synthetic siNA antisense region
caaaagcaaagugugugcu

SEQ ID NO: 3177 - RNA, 19 nt, Artificial Sequence
  Synthetic siNA antisense region
gaguaccgucagcacaagc

SEQ ID NO: 3178 - RNA, 19 nt, Artificial Sequence
  Synthetic siNA antisense region
gcagcugauagguaugucg

SEQ ID NO: 3179 - RNA, 19 nt, Artificial Sequence
  Synthetic siNA antisense region
gugaaacugaucuugcacg

SEQ ID NO: 3180 - RNA, 19 nt, Artificial Sequence
  Synthetic siNA antisense region
gucugaugaaaaguuuugg

SEQ ID NO: 3181 - RNA, 19 nt, Artificial Sequence
  Synthetic siNA antisense region
cuuguugaaccuccucuug

SEQ ID NO: 3182 - RNA, 19 nt, Artificial Sequence
  Synthetic siNA antisense region
aaaguggcgaguagagcuc

SEQ ID NO: 3183 - RNA, 19 nt, Artificial Sequence
  Synthetic siNA antisense region
gagcagcaacaaugagaaa

SEQ ID NO: 3184 - RNA, 19 nt, Artificial Sequence
  Synthetic siNA antisense region
aaaguauuaaaaauacuag

SEQ ID NO: 3185 - RNA, 19 nt, Artificial Sequence
  Synthetic siNA antisense region
uucucuuaauggugaagca

SEQ ID NO: 3186 - RNA, 19 nt, Artificial Sequence
  Synthetic siNA antisense region
agcucauucauucugucuu

SEQ ID NO: 3187 - RNA, 19 nt, Artificial Sequence
  Synthetic siNA antisense region
uagaagucaauuaaaguga

SEQ ID NO: 3188 - RNA, 19 nt, Artificial Sequence
  Synthetic siNA antisense region
aaggcuaaaaagcacaaau

SEQ ID NO: 3189 - RNA, 19 nt, Artificial Sequence
  Synthetic siNA antisense region
aaaacaaggaauagcagaa

SEQ ID NO: 3190 - RNA, 19 nt, Artificial Sequence
  Synthetic siNA antisense region
aauauaauaagcauuauua

SEQ ID NO: 3191 - RNA, 19 nt, Artificial Sequence
  Synthetic siNA antisense region
auuucgagugaaaaccaaa

SEQ ID NO: 3192 - RNA, 19 nt, Artificial Sequence
  Synthetic siNA antisense region
gguucuucuagauccugga

SEQ ID NO: 3193 - RNA, 19 nt, Artificial Sequence
  Synthetic siNA antisense region
guuuagacuuugguacaag

SEQ ID NO: 3194 - RNA, 19 nt, Artificial Sequence
  Synthetic siNA antisense region
augagaaguuucauguucg

SEQ ID NO: 3195 - RNA, 19 nt, Artificial Sequence
  Synthetic siNA antisense region
gaaauacaagucaaaacaa

SEQ ID NO: 3196 - RNA, 19 nt, Artificial Sequence
  Synthetic siNA antisense region
cauaugcaacugcauagag

SEQ ID NO: 3197 - RNA, 19 nt, Artificial Sequence
  Synthetic siNA antisense region
cagcgcuguacuacagugc

SEQ ID NO: 3198 - RNA, 19 nt, Artificial Sequence
  Synthetic siNA antisense region
ugagguuuauuagaugcac

SEQ ID NO: 3199 - RNA, 19 nt, Artificial Sequence
  Synthetic siNA antisense region
caaggaucuucaagcacau

SEQ ID NO: 3200 - RNA, 19 nt, Artificial Sequence
  Synthetic siNA antisense region
cccuaguguuguaccuuac

SEQ ID NO: 3201 - RNA, 19 nt, Artificial Sequence
  Synthetic siNA antisense region
cagugcuauaaguauuacc

SEQ ID NO: 3202 - RNA, 19 nt, Artificial Sequence
  Synthetic siNA antisense region
cuagagcacaaagccaagc

SEQ ID NO: 3203 - RNA, 19 nt, Artificial Sequence
  Synthetic siNA antisense region
gaaaagguaaaaccuuucc

SEQ ID NO: 3204 - RNA, 19 nt, Artificial Sequence
  Synthetic siNA antisense region
ccauagugugccaucuaug

SEQ ID NO: 3205 - RNA, 19 nt, Artificial Sequence
  Synthetic siNA antisense region
uaggugugcauguuugaac

SEQ ID NO: 3206 - RNA, 19 nt, Artificial Sequence
  Synthetic siNA antisense region
gacaguugauaguaacauu

SEQ ID NO: 3207 - RNA, 19 nt, Artificial Sequence
  Synthetic siNA antisense region
caccaccagcuggaucuug

SEQ ID NO: 3208 - RNA, 19 nt, Artificial Sequence
  Synthetic siNA antisense region
aacaccuagcuauaagcgc

SEQ ID NO: 3209 - RNA, 19 nt, Artificial Sequence
  Synthetic siNA antisense region
gaccuucaugaagguacca

SEQ ID NO: 3210 - RNA, 19 nt, Artificial Sequence
  Synthetic siNA antisense region
uaaaugcagcaguuuggug

SEQ ID NO: 3211 - RNA, 19 nt, Artificial Sequence
  Synthetic siNA antisense region
aaacaacaaguacgucucu

SEQ ID NO: 3212 - RNA, 19 nt, Artificial Sequence
  Synthetic siNA antisense region
aauuuguucguuuauuuaa

SEQ ID NO: 3213 - RNA, 19 nt, Artificial Sequence
  Synthetic siNA antisense region
uccauuaucagacauuuua

SEQ ID NO: 3214 - RNA, 19 nt, Artificial Sequence
  Synthetic siNA antisense region
acguugguuugauuggggu

SEQ ID NO: 3215 - RNA, 19 nt, Artificial Sequence
  Synthetic siNA antisense region
uguaaugcggggggcacua

SEQ ID NO: 3216 - RNA, 19 nt, Artificial Sequence
  Synthetic siNA antisense region
aucuguggguccaccaaau

SEQ ID NO: 3217 - RNA, 19 nt, Artificial Sequence
  Synthetic siNA antisense region
cugguuauugucaguugaa

SEQ ID NO: 3218 - RNA, 19 nt, Artificial Sequence
  Synthetic siNA antisense region
cccauugcguccuccauuc

SEQ ID NO: 3219 - RNA, 19 nt, Artificial Sequence
  Synthetic siNA antisense region
gcgcuguuuuggccuugcc

SEQ ID NO: 3220 - RNA, 19 nt, Artificial Sequence
  Synthetic siNA antisense region
ggguaaaccuuggggucgg

SEQ ID NO: 3221 - RNA, 19 nt, Artificial Sequence
  Synthetic siNA antisense region
ccaagacgcaguauuauug

SEQ ID NO: 3222 - RNA, 19 nt, Artificial Sequence
  Synthetic siNA antisense region
cugagugagagcugugaac

SEQ ID NO: 3223 - RNA, 19 nt, Artificial Sequence
  Synthetic siNA antisense region
aaguuccuccuugccaugc

SEQ ID NO: 3224 - RNA, 19 nt, Artificial Sequence
  Synthetic siNA antisense region
cuggccucgagggaaucua

SEQ ID NO: 3225 - RNA, 19 nt, Artificial Sequence
  Synthetic siNA antisense region
gguguugauuggaacgccc

SEQ ID NO: 3226 - RNA, 19 nt, Artificial Sequence
  Synthetic siNA antisense region
gucaucuggaccacuauug

SEQ ID NO: 3227 - RNA, 19 nt, Artificial Sequence
  Synthetic siNA antisense region
ucgguaguagccaauuugg

SEQ ID NO: 3228 - RNA, 19 nt, Artificial Sequence
  Synthetic siNA antisense region
aacucgucggguagcucuu

SEQ ID NO: 3229 - RNA, 19 nt, Artificial Sequence
  Synthetic siNA antisense region
uuugccgucaccaccacga

SEQ ID NO: 3230 - RNA, 19 nt, Artificial Sequence
  Synthetic siNA antisense region
ggggcugagcucuuucauu

SEQ ID NO: 3231 - RNA, 19 nt, Artificial Sequence
  Synthetic siNA antisense region
guaauagaaguaccaucug

SEQ ID NO: 3232 - RNA, 19 nt, Artificial Sequence
  Synthetic siNA antisense region
uucugggccaguuccuagg

SEQ ID NO: 3233 - RNA, 19 nt, Artificial Sequence
  Synthetic siNA antisense region
gccguagggaagugaagcu

SEQ ID NO: 3234 - RNA, 19 nt, Artificial Sequence
  Synthetic siNA antisense region
gaugccuucuuuguuagcg

SEQ ID NO: 3235 - RNA, 19 nt, Artificial Sequence
  Synthetic siNA antisense region
cucaguugcaacccauacg

SEQ ID NO: 3236 - RNA, 19 nt, Artificial Sequence
  Synthetic siNA antisense region
ggguguauucaaggcuccc

SEQ ID NO: 3237 - RNA, 19 nt, Artificial Sequence
  Synthetic siNA antisense region
ggugccaauguggucuuug

SEQ ID NO: 3238 - RNA, 19 nt, Artificial Sequence
  Synthetic siNA antisense region
auuguuauuaggauugcgg

SEQ ID NO: 3239 - RNA, 19 nt, Artificial Sequence
  Synthetic siNA antisense region
uuguagcacgguggcagca

SEQ ID NO: 3240 - RNA, 19 nt, Artificial Sequence
  Synthetic siNA antisense region
uguuguuccuugaggaagu

SEQ ID NO: 3241 - RNA, 19 nt, Artificial Sequence
  Synthetic siNA antisense region
guagaagccuuuuggcaau

SEQ ID NO: 3242 - RNA, 19 nt, Artificial Sequence
  Synthetic siNA antisense region
gccucugcuucccucugcg

SEQ ID NO: 3243 - RNA, 19 nt, Artificial Sequence
  Synthetic siNA antisense region
agaagaggcuugacugccg

SEQ ID NO: 3244 - RNA, 19 nt, Artificial Sequence
  Synthetic siNA antisense region
acuacgugaugaggagcga

SEQ ID NO: 3245 - RNA, 19 nt, Artificial Sequence
  Synthetic siNA antisense region
auuucuugaauuaccgcga

SEQ ID NO: 3246 - RNA, 19 nt, Artificial Sequence
  Synthetic siNA antisense region
acugcugccaggaguugaa

SEQ ID NO: 3247 - RNA, 19 nt, Artificial Sequence
  Synthetic siNA antisense region
agcaggagaauuuccccua

SEQ ID NO: 3248 - RNA, 19 nt, Artificial Sequence
  Synthetic siNA antisense region
accuccgcuagccauucga

SEQ ID NO: 3249 - RNA, 19 nt, Artificial Sequence
  Synthetic siNA antisense region
cgcgagggcaguuucacca

SEQ ID NO: 3250 - RNA, 19 nt, Artificial Sequence
  Synthetic siNA antisense region
ucugucuagcagcaauagc

SEQ ID NO: 3251 - RNA, 19 nt, Artificial Sequence
  Synthetic siNA antisense region
gcucucaagcugguucaau

SEQ ID NO: 3252 - RNA, 19 nt, Artificial Sequence
  Synthetic siNA antisense region
gccuuuaccagaaacuuug

SEQ ID NO: 3253 - RNA, 19 nt, Artificial Sequence
  Synthetic siNA antisense region
uuggccuuguuguuguugg

SEQ ID NO: 3254 - RNA, 19 nt, Artificial Sequence
  Synthetic siNA antisense region
agauuucuuagugacaguu

SEQ ID NO: 3255 - RNA, 19 nt, Artificial Sequence
  Synthetic siNA antisense region
uuuagaugccucagcagca

SEQ ID NO: 3256 - RNA, 19 nt, Artificial Sequence
  Synthetic siNA antisense region
acguuuuuggcgaggcuuu

SEQ ID NO: 3257 - RNA, 19 nt, Artificial Sequence
  Synthetic siNA antisense region
guacuguuuuguggcagua

SEQ ID NO: 3258 - RNA, 19 nt, Artificial Sequence
  Synthetic siNA antisense region
aaaugcuugagugacguug

SEQ ID NO: 3259 - RNA, 19 nt, Artificial Sequence
  Synthetic siNA antisense region
uucuggaccacgucuccca

SEQ ID NO: 3260 - RNA, 19 nt, Artificial Sequence
  Synthetic siNA antisense region
gaaauuuccuuggguuugu

SEQ ID NO: 3261 - RNA, 19 nt, Artificial Sequence
  Synthetic siNA antisense region
gauuaggucuugguccccg

SEQ ID NO: 3262 - RNA, 19 nt, Artificial Sequence
  Synthetic siNA antisense region
guaaucaguuccuugucug

SEQ ID NO: 3263 - RNA, 19 nt, Artificial Sequence
  Synthetic siNA antisense region
aauuugcggccaauguuug

SEQ ID NO: 3264 - RNA, 19 nt, Artificial Sequence
  Synthetic siNA antisense region
acuuggagcaaauugugca

SEQ ID NO: 3265 - RNA, 19 nt, Artificial Sequence
  Synthetic siNA antisense region
uccaaagaaugcagaggca

SEQ ID NO: 3266 - RNA, 19 nt, Artificial Sequence
  Synthetic siNA antisense region
caugccaaugcgugacauu

SEQ ID NO: 3267 - RNA, 19 nt, Artificial Sequence
  Synthetic siNA antisense region
ucccgaaggugugacuucc

SEQ ID NO: 3268 - RNA, 19 nt, Artificial Sequence
  Synthetic siNA antisense region
augauaagucagccauguu

SEQ ID NO: 3269 - RNA, 19 nt, Artificial Sequence
  Synthetic siNA antisense region
auccaauuuaauggcucca

SEQ ID NO: 3270 - RNA, 19 nt, Artificial Sequence
  Synthetic siNA antisense region
gaauuguggaucuuuguca

SEQ ID NO: 3271 - RNA, 19 nt, Artificial Sequence
  Synthetic siNA antisense region
caguaugacguugucuuug

SEQ ID NO: 3272 - RNA, 19 nt, Artificial Sequence
  Synthetic siNA antisense region
gucaaugugcuuguucagc

SEQ ID NO: 3273 - RNA, 19 nt, Artificial Sequence
  Synthetic siNA antisense region
ugggaauguuuuguaugcg

SEQ ID NO: 3274 - RNA, 19 nt, Artificial Sequence
  Synthetic siNA antisense region
cuuuuuaggcucuguuggu

SEQ ID NO: 3275 - RNA, 19 nt, Artificial Sequence
  Synthetic siNA antisense region
agucuuuuucuuuuugucc

SEQ ID NO: 3276 - RNA, 19 nt, Artificial Sequence
  Synthetic siNA antisense region
caaaggcugagcuucauca

SEQ ID NO: 3277 - RNA, 19 nt, Artificial Sequence
  Synthetic siNA antisense region
cuucuuuugucucugcggc

SEQ ID NO: 3278 - RNA, 19 nt, Artificial Sequence
  Synthetic siNA antisense region
aagagucacagugggcugc

SEQ ID NO: 3279 - RNA, 19 nt, Artificial Sequence
  Synthetic siNA antisense region
caugucagccgcaggaaga

SEQ ID NO: 3280 - RNA, 19 nt, Artificial Sequence
  Synthetic siNA antisense region
uugucuggagaaaucaucc

SEQ ID NO: 3281 - RNA, 19 nt, Artificial Sequence
  Synthetic siNA antisense region
acucauggaauuuugaagu

SEQ ID NO: 3282 - RNA, 19 nt, Artificial Sequence
  Synthetic siNA antisense region
ugaaucagcagaagcucca

SEQ ID NO: 3283 - RNA, 19 nt, Artificial Sequence
  Synthetic siNA antisense region
gaguguuuaugccugaguu

SEQ ID NO: 3284 - RNA, 19 nt, Artificial Sequence
  Synthetic siNA antisense region
gccuuguguggucaucaug

SEQ ID NO: 3285 - RNA, 19 nt, Artificial Sequence
  Synthetic siNA antisense region
cguuuacauagcccaucug

SEQ ID NO: 3286 - RNA, 19 nt, Artificial Sequence
  Synthetic siNA antisense region
uaaacggaauugcgaaaac

SEQ ID NO: 3287 - RNA, 19 nt, Artificial Sequence
  Synthetic siNA antisense region
agaguagacuauguaucgu

SEQ ID NO: 3288 - RNA, 19 nt, Artificial Sequence
  Synthetic siNA antisense region
gagaauucauucugcacaa

SEQ ID NO: 3289 - RNA, 19 nt, Artificial Sequence
  Synthetic siNA antisense region
cuugugcuguuuaguuacg

SEQ ID NO: 3290 - RNA, 19 nt, Artificial Sequence
  Synthetic siNA antisense region
uaaaguuaacuaaaccuac

SEQ ID NO: 3291 - RNA, 19 nt, Artificial Sequence
  Synthetic siNA antisense region
aagauugcuaugugagauu

SEQ ID NO: 3292 - RNA, 19 nt, Artificial Sequence
  Synthetic siNA antisense region
aauguuacacauugauuaa

SEQ ID NO: 3293 - RNA, 19 nt, Artificial Sequence
  Synthetic siNA antisense region
cucuuucaaguccucccua

SEQ ID NO: 3294 - RNA, 19 nt, Artificial Sequence
  Synthetic siNA antisense region
ucgaugaaaaugugguggc

SEQ ID NO: 3295 - RNA, 19 nt, Artificial Sequence
  Synthetic siNA antisense region
aucguacuccgcguggccu

SEQ ID NO: 3296 - RNA, 19 nt, Artificial Sequence
  Synthetic siNA antisense region
uuauucacuguacccucga

SEQ ID NO: 3297 - RNA, 19 nt, Artificial Sequence
  Synthetic siNA antisense region
aggcagcucucccuagcau

SEQ ID NO: 3298 - RNA, 19 nt, Artificial Sequence
  Synthetic siNA antisense region
auuagggcucuuccauaua

SEQ ID NO: 3299 - RNA, 19 nt, Artificial Sequence
  Synthetic siNA antisense region
cuaaaauuaauuuuacaca

SEQ ID NO: 3300 - RNA, 19 nt, Artificial Sequence
  Synthetic siNA antisense region
cacauggggauagcacuac

SEQ ID NO: 3301 - RNA, 19 nt, Artificial Sequence
  Synthetic siNA antisense region
cuaagaagcuauuaaaauc

SEQ ID NO: 3302 - RNA, 19 nt, Artificial Sequence
  Synthetic siNA antisense region
uuuuuuuuugucauucucc

SEQ ID NO: 3303 - RNA, 23 nt, Artificial Sequence
  Synthetic siNA antisense region
ugaaugaagagguugccaucauu

SEQ ID NO: 3304 - RNA, 23 nt, Artificial Sequence
  Synthetic siNA antisense region
uguugcaucuccacaggagugua

SEQ ID NO: 3305 - RNA, 23 nt, Artificial Sequence
  Synthetic siNA antisense region
cucaaagcaagggacuuuaccgu

SEQ ID NO: 3306 - RNA, 23 nt, Artificial Sequence
  Synthetic siNA antisense region
cuguguaaauggccucaugcucu

SEQ ID NO: 3307 - RNA, 23 nt, Artificial Sequence
  Synthetic siNA antisense region
uuugugcuugcugcugucuacag

SEQ ID NO: 3308 - RNA, 23 nt, Artificial Sequence
  Synthetic siNA antisense region
acuugucauuggugcugugauca

SEQ ID NO: 3309 - RNA, 23 nt, Artificial Sequence
  Synthetic siNA antisense region
uugaaccagcuugagagcaaagu

SEQ ID NO: 3310 - RNA, 23 nt, Artificial Sequence
  Synthetic siNA antisense region
gcuuguuuuccucuggcucuugu

SEQ ID NO: 3311 - DNA, 21 bp, Artificial sequence
  Synthetic siNA sense region
  misc_feature (1)..(19): ribonucleotide unmodified or modified as described for this sequence
aaugaagagguugccaucatt

SEQ ID NO: 3312 - DNA, 21 bp, Artificial sequence
  Synthetic siNA sense region
  misc_feature (1)..(19): ribonucleotide unmodified or modified as described for this sequence
uugcaucuccacaggagugtt

SEQ ID NO: 3313 - DNA, 21 bp, Artificial sequence
  Synthetic siNA sense region
  misc_feature (1)..(19): ribonucleotide unmodified or modified as described for this sequence
caaagcaagggacuuuacctt

SEQ ID NO: 3314 - DNA, 21 bp, Artificial sequence
  Synthetic siNA sense region
  misc_feature (1)..(19): ribonucleotide unmodified or modified as described for this sequence
guguaaauggccucaugcutt

SEQ ID NO: 3315 - DNA, 21 bp, Artificial sequence
  Synthetic siNA sense region
  misc_feature (1)..(19): ribonucleotide unmodified or modified as described for this sequence
ugugcuugcugcugucuactt

SEQ ID NO: 3316 - DNA, 21 bp, Artificial sequence
  Synthetic siNA sense region
  misc_feature (1)..(19): ribonucleotide unmodified or modified as described for this sequence
uugucauuggugcugugautt

SEQ ID NO: 3317 - DNA, 21 bp, Artificial sequence
  Synthetic siNA sense region
  misc_feature (1)..(19): ribonucleotide unmodified or modified as described for this sequence
gaaccagcuugagagcaaatt

SEQ ID NO: 3318 - DNA, 21 bp, Artificial sequence
  Synthetic siNA sense region
  misc_feature (1)..(19): ribonucleotide unmodified or modified as described for this sequence
uuguuuuccucuggcucuutt

SEQ ID NO: 3319 - DNA, 21 bp, Artificial sequence
  Synthetic siNA antisense region
  misc_feature (1)..(19): ribonucleotide unmodified or modified as described for this sequence
ugauggcaaccucuucauutt

SEQ ID NO: 3320 - DNA, 21 bp, Artificial sequence
  Synthetic siNA antisense region
  misc_feature (1)..(19): ribonucleotide unmodified or modified as described for this sequence
cacuccuguggagaugcaatt

SEQ ID NO: 3321 - DNA, 21 bp, Artificial sequence
  Synthetic siNA antisense region
  misc_feature (1)..(19): ribonucleotide unmodified or modified as described for this sequence
gguaaagucccuugcuuugtt

SEQ ID NO: 3322 - DNA, 21 bp, Artificial sequence
  Synthetic siNA antisense region
  misc_feature (1)..(19): ribonucleotide unmodified or modified as described for this sequence
agcaugaggccauuuacactt

SEQ ID NO: 3323 - DNA, 21 bp, Artificial sequence
  Synthetic siNA antisense region
  misc_feature (1)..(19): ribonucleotide unmodified or modified as described for this sequence
guagacagcagcaagcacatt

SEQ ID NO: 3324 - DNA, 21 bp, Artificial sequence
  Synthetic siNA antisense region
  misc_feature (1)..(19): ribonucleotide unmodified or modified as described for this sequence
aucacagcaccaaugacaatt

SEQ ID NO: 3325 - DNA, 21 bp, Artificial sequence
  Synthetic siNA antisense region
  misc_feature (1)..(19): ribonucleotide unmodified or modified as described for this sequence
uuugcucucaagcugguuctt

SEQ ID NO: 3326 - DNA, 21 bp, Artificial sequence
  Synthetic siNA antisense region
  misc_feature (1)..(19): ribonucleotide unmodified or modified as described for this sequence
aagagccagaggaaaacaatt

SEQ ID NO: 3327 - DNA, 21 bp, Artificial sequence
  Synthetic siNA sense region
  misc_feature (1)..(1): 5'-3 attached terminal deoxyabasic moiety
  misc_feature (3)..(3): 2'-deoxy-2'-fluoro
  misc_feature (11)..(12): 2'-deoxy-2'-fluoro
  misc_feature (14)..(15): 2'-deoxy-2'-fluoro
  misc_feature (17)..(18): 2'-deoxy-2'-fluoro
  misc_feature (1)..(19): ribonucleotide unmodified or modified as described for this sequence
  misc_feature (21)..(21): 3'-3 attached terminal deoxyabasic moiety
aaugaagagguugccaucatt

SEQ ID NO: 3328 - DNA, 21 bp, Artificial sequence
  Synthetic siNA sense region
  misc_feature (1)..(2): 2'-deoxy-2'-fluoro
  misc_feature (1)..(1): 5'-3 attached terminal deoxyabasic moiety
  misc_feature (4)..(4): 2'-deoxy-2'-fluoro
  misc_feature (6)..(10): 2'-deoxy-2'-fluoro
  misc_feature (12)..(12): 2'-deoxy-2'-fluoro
  misc_feature (18)..(18): 2'-deoxy-2'-fluoro
  misc_feature (1)..(19): ribonucleotide unmodified or modified as described for this sequence
  misc_feature (21)..(21): 3'-3 attached terminal deoxyabasic moiety
uugcaucuccacaggagugtt

SEQ ID NO: 3329 - DNA, 21 bp, Artificial sequence
  Synthetic siNA sense region
  misc_feature (1)..(1): 2'-deoxy-2'-fluoro
  misc_feature (1)..(1): 5'-3 attached terminal deoxyabasic moiety
  misc_feature (6)..(6): 2'-deoxy-2'-fluoro
  misc_feature (13)..(16): 2'-deoxy-2'-fluoro
  misc_feature (18)..(19): 2'-deoxy-2'-fluoro
  misc_feature (1)..(19): ribonucleotide unmodified or modified as described for this sequence
  misc_feature (21)..(21): 3'-3 attached terminal deoxyabasic moiety
caaagcaagggacuuuacctt

SEQ ID NO: 3330 - DNA, 21 bp, Artificial sequence
  Synthetic siNA sense region
  misc_feature (1)..(1): 5'-3 attached terminal deoxyabasic moiety
  misc_feature (2)..(2): 2'-deoxy-2'-fluoro
  misc_feature (4)..(4): 2'-deoxy-2'-fluoro
  misc_feature (8)..(8): 2'-deoxy-2'-fluoro
  misc_feature (11)..(14): 2'-deoxy-2'-fluoro
  misc_feature (16)..(16): 2'-deoxy-2'-fluoro
  misc_feature (18)..(19): 2'-deoxy-2'-fluoro
  misc_feature (1)..(19): ribonucleotide unmodified or modified as described for this sequence
  misc_feature (21)..(21): 3'-3 attached terminal deoxyabasic moiety
guguaaauggccucaugcutt

SEQ ID NO: 3331 - DNA, 21 bp, Artificial sequence
  Synthetic siNA sense region
  misc_feature (1)..(1): 2'-deoxy-2'-fluoro
  misc_feature (1)..(1): 5'-3 attached terminal deoxyabasic moiety
  misc_feature (3)..(3): 2'-deoxy-2'-fluoro
  misc_feature (5)..(7): 2'-deoxy-2'-fluoro
  misc_feature (9)..(10): 2'-deoxy-2'-fluoro
  misc_feature (12)..(13): 2'-deoxy-2'-fluoro
  misc_feature (15)..(17): 2'-deoxy-2'-fluoro
  misc_feature (19)..(19): 2'-deoxy-2'-fluoro
  misc_feature (1)..(19): ribonucleotide unmodified or modified as described for this sequence
  misc_feature (21)..(21): 3'-3 attached terminal deoxyabasic moiety
ugugcuugcugcugucuactt

SEQ ID NO: 3332 - DNA, 21 bp, Artificial sequence
  Synthetic siNA sense region
  misc_feature (1)..(2): 2'-deoxy-2'-fluoro
  misc_feature (1)..(1): 5'-3 attached terminal deoxyabasic moiety
  misc_feature (4)..(5): 2'-deoxy-2'-fluoro
  misc_feature (7)..(8): 2'-deoxy-2'-fluoro
  misc_feature (11)..(11): 2'-deoxy-2'-fluoro
  misc_feature (13)..(14): 2'-deoxy-2'-fluoro
  misc_feature (16)..(16): 2'-deoxy-2'-fluoro
  misc_feature (19)..(19): 2'-deoxy-2'-fluoro
  misc_feature (1)..(19): ribonucleotide unmodified or modified as described for this sequence
  misc_feature (21)..(21): 3'-3 attached terminal deoxyabasic moiety
uugucauuggugcugugautt

SEQ ID NO: 3333 - DNA, 21 bp, Artificial sequence
  Synthetic siNA sense region
  misc_feature: 2'-deoxy-2'-fluoro
  misc_feature (1)..(1): 5'-3 attached terminal deoxyabasic moiety
  misc_feature (4)..(5): 2'-deoxy-2'-fluoro
  misc_feature (8)..(10): 2'-deoxy-2'-fluoro
  misc_feature (16)..(16): 2'-deoxy-2'-fluoro
  misc_feature (1)..(19): ribonucleotide unmodified or modified as described for this sequence
  misc_feature (21)..(21): 3'-3 attached terminal deoxyabasic moiety
gaaccagcuugagagcaaatt

SEQ ID NO: 3334 - DNA, 21 bp, Artificial sequence
  Synthetic siNA sense region
  misc_feature (1)..(2): 2'-deoxy-2'-fluoro
  misc_feature (1)..(1): 5'-3 attached terminal deoxyabasic moiety
  misc_feature (4)..(12): 2'-deoxy-2'-fluoro
  misc_feature (15)..(19): 2'-deoxy-2'-fluoro
  misc_feature (1)..(19): ribonucleotide unmodified or modified as described for this sequence
  misc_feature (21)..(21): 3'-3 attached terminal deoxyabasic moiety
uuguuuuccucuggcucuutt

SEQ ID NO: 3335 - DNA, 21 bp, Artificial sequence
  Synthetic siNA antisense region
  misc_feature (1)..(1): 2'-deoxy-2'-fluoro
  misc_feature (4)..(4): 2'-deoxy-2'-fluoro
  misc_feature (7)..(7): 2'-deoxy-2'-fluoro
  misc_feature (10)..(16): 2'-deoxy-2'-fluoro
  misc_feature (18)..(19): 2'-deoxy-2'-fluoro
  misc_feature (1)..(19): ribonucleotide unmodified or modified as described for this sequence
  misc_feature (20)..(20): Phosphorothioate 3'-Internucleotide Linkage
ugauggcaaccucuucauutt

SEQ ID NO: 3336 - DNA, 21 bp, Artificial sequence
  Synthetic siNA antisense region
  misc_feature: 2'-deoxy-2'-fluoro
  misc_feature (1)..(1): 2'-deoxy-2'-fluoro
  misc_feature (3)..(7): 2'-deoxy-2'-fluoro
  misc_feature (9)..(9): 2'-deoxy-2'-fluoro
  misc_feature (15)..(15): 2'-deoxy-2'-fluoro
  misc_feature (17)..(17): 2'-deoxy-2'-fluoro
  misc_feature (1)..(19): ribonucleotide unmodified or modified as described for this sequence
  misc_feature (20)..(20): Phosphorothioate 3'-Internucleotide Linkage
cacuccuguggagaugcaatt

SEQ ID NO: 3337 - DNA, 21 bp, Artificial sequence
  Synthetic siNA antisense region
  misc_feature (3)..(3): 2'-deoxy-2'-fluoro
  misc_feature (8)..(13): 2'-deoxy-2'-fluoro
  misc_feature (15)..(18): 2'-deoxy-2'-fluoro
  misc_feature (1)..(19): ribonucleotide unmodified or modified as described for this sequence
  misc_feature (20)..(20): Phosphorothioate 3'-Internucleotide Linkage
gguaaagucccuugcuuugtt

SEQ ID NO: 3338 - DNA, 21 bp, Artificial sequence
  Synthetic siNA antisense region
  misc_feature (1)..(15): 2'-deoxy-2'-fluoro
  misc_feature (3)..(3): 2'-deoxy-2'-fluoro
  misc_feature (5)..(5): 2'-deoxy-2'-fluoro
  misc_feature (10)..(11): 2'-deoxy-2'-fluoro
  misc_feature (13)..(15): 2'-deoxy-2'-fluoro
  misc_feature (17)..(17): 2'-deoxy-2'-fluoro
  misc_feature (19)..(19): 2'-deoxy-2'-fluoro
  misc_feature (1)..(19): ribonucleotide unmodified or modified as described for this sequence
  misc_feature (20)..(20): Phosphorothioate 3'-Internucleotide Linkage
agcaugaggccauuuacactt

SEQ ID NO: 3339 - DNA, 21 bp, Artificial sequence
  Synthetic siNA antisense region
  misc_feature (2)..(2): 2'-deoxy-2'-fluoro
  misc_feature (6)..(6): 2'-deoxy-2'-fluoro
  misc_feature (9)..(9): 2'-deoxy-2'-fluoro
  misc_feature (12)..(12): 2'-deoxy-2'-fluoro
  misc_feature (16)..(16): 2'-deoxy-2'-fluoro
  misc_feature (18)..(18): 2'-deoxy-2'-fluoro
  misc_feature (1)..(19): ribonucleotide unmodified or modified as described for this sequence
  misc_feature (20)..(20): Phosphorothioate 3'-Internucleotide Linkage
guagacagcagcaagcacatt

SEQ ID NO: 3340 - DNA, 21 bp, Artificial sequence
  Synthetic siNA antisense region
  misc_feature (2)..(3): 2'-deoxy-2'-fluoro
  misc_feature (5)..(5): 2'-deoxy-2'-fluoro
  misc_feature (8)..(8): 2'-deoxy-2'-fluoro
  misc_feature (10)..(11): 2'-deoxy-2'-fluoro
  misc_feature (14)..(14): 2'-deoxy-2'-fluoro
  misc_feature (17)..(17): 2'-deoxy-2'-fluoro
  misc_feature (1)..(19): ribonucleotide unmodified or modified as described for this sequence
  misc_feature (20)..(20): Phosphorothioate 3'-Internucleotide Linkage
aucacagcaccaaugacaatt

SEQ ID NO: 3341 - DNA, 21 bp, Artificial sequence
  Synthetic siNA antisense region
  misc_feature (1)..(3): 2'-deoxy-2'-fluoro
  misc_feature (5)..(9): 2'-deoxy-2'-fluoro
  misc_feature (13)..(14): 2'-deoxy-2'-fluoro
  misc_feature (17)..(19): 2'-deoxy-2'-fluoro
  misc_feature (1)..(19): ribonucleotide unmodified or modified as described for this sequence
  misc_feature (20)..(20): Phosphorothioate 3'-Internucleotide Linkage
uuugcucucaagcugguuctt

SEQ ID NO: 3342 - DNA, 21 bp, Artificial sequence
  Synthetic siNA antisense region
  misc_feature (6)..(7): 2'-deoxy-2'-fluoro
  misc_feature (17)..(17): 2'-deoxy-2'-fluoro
  misc_feature (1)..(19): ribonucleotide unmodified or modified as described for this sequence
  misc_feature (20)..(20): Phosphorothioate 3'-Internucleotide Linkage
aagagccagaggaaaacaatt

SEQ ID NO: 3343 - DNA, 21 bp, Artificial sequence
  Synthetic siNA sense region
  misc_feature (1)..(2): 2'-deoxy
  misc_feature (1)..(1): 5'-3 attached terminal deoxyabasic moiety
  misc_feature (3)..(3): 2'-deoxy-2'-fluoro
  misc_feature (4)..(10): 2'-deoxy
  misc_feature (11)..(12): 2'-deoxy-2'-fluoro
  misc_feature (13)..(13): 2'-deoxy
  misc_feature (14)..(15): 2'-deoxy-2'-fluoro
  misc_feature (16)..(16): 2'-deoxy
  misc_feature (17)..(18): 2'-deoxy-2'-fluoro
  misc_feature (19)..(19): 2'-deoxy
  misc_feature (1)..(19): ribonucleotide unmodified or modified as described for this sequence
  misc_feature (21)..(21): 3'-3 attached terminal deoxyabasic moiety
aaugaagagguugccaucatt

SEQ ID NO: 3344 - DNA, 21 bp, Artificial sequence
  Synthetic siNA sense region
  misc_feature (1)..(2): 2'-deoxy-2'-fluoro
  misc_feature (1)..(1): 5'-3 attached terminal deoxyabasic moiety
  misc_feature (3)..(3): 2'-deoxy
  misc_feature (4)..(4): 2'-deoxy-2'-fluoro
  misc_feature (5)..(5): 2'-deoxy
  misc_feature (6)..(10): 2'-deoxy-2'-fluoro
  misc_feature (11)..(11): 2'-deoxy
  misc_feature (12)..(12): 2'-deoxy-2'-fluoro
  misc_feature (13)..(17): 2'-deoxy
  misc_feature (18)..(18): 2'-deoxy-2'-fluoro
  misc_feature (19)..(19): 2'-deoxy
  misc_feature (1)..(19): ribonucleotide unmodified or modified as described for this sequence
  misc_feature (21)..(21): 3'-3 attached terminal deoxyabasic moiety
uugcaucuccacaggagugtt

SEQ ID NO: 3345 - DNA, 21 bp, Artificial sequence
  Synthetic siNA sense region
  misc_feature (1)..(1): 2'-deoxy-2'-fluoro
  misc_feature (1)..(1): 5'-3 attached terminal deoxyabasic moiety
  misc_feature (2)..(5): 2'-deoxy
  misc_feature (6)..(6): 2'-deoxy-2'-fluoro
  misc_feature (7)..(12): 2'-deoxy
  misc_feature (13)..(16): 2'-deoxy-2'-fluoro
  misc_feature (17)..(17): 2'-deoxy
  misc_feature (18)..(19): 2'-deoxy-2'-fluoro
  misc_feature (1)..(19): ribonucleotide unmodified or modified as described for this sequence
  misc_feature (21)..(21): 3'-3 attached terminal deoxyabasic moiety
caaagcaagggacuuuacctt

SEQ ID NO: 3346 - DNA, 21 bp, Artificial sequence
  Synthetic siNA sense region
  misc_feature: 2'-deoxy
  misc_feature (1)..(1): 2'-deoxy
  misc_feature (1)..(1): 5'-3 attached terminal deoxyabasic moiety
  misc_feature (2)..(2): 2'-deoxy-2'-fluoro
  misc_feature (3)..(3): 2'-deoxy
  misc_feature (4)..(4): 2'-deoxy-2'-fluoro
  misc_feature (5)..(7): 2'-deoxy
  misc_feature (8)..(8): 2'-deoxy-2'-fluoro
  misc_feature (9)..(10): 2'-deoxy
  misc_feature (11)..(14): 2'-deoxy-2'-fluoro
  misc_feature (15)..(15): 2'-deoxy
  misc_feature (16)..(16): 2'-deoxy-2'-fluoro
  misc_feature (17)..(17): 2'-deoxy
  misc_feature (18)..(19): 2'-deoxy-2'-fluoro
  misc_feature (1)..(19): ribonucleotide unmodified or modified as described for this sequence
  misc_feature (21)..(21): 3'-3 attached terminal deoxyabasic moiety
guguaaauggccucaugcutt

SEQ ID NO: 3347 - DNA, 21 bp, Artificial sequence
  Synthetic siNA sense region
  misc_feature (1)..(1): 2'-deoxy-2'-fluoro
  misc_feature (1)..(1): 5'-3 attached terminal deoxyabasic moiety
  misc_feature (2)..(2): 2'-deoxy
  misc_feature (3)..(3): 2'-deoxy-2'-fluoro
  misc_feature (4)..(4): 2'-deoxy
  misc_feature (5)..(7): 2'-deoxy-2'-fluoro
  misc_feature (8)..(8): 2'-deoxy
  misc_feature (9)..(10): 2'-deoxy-2'-fluoro
  misc_feature (11)..(11): 2'-deoxy
  misc_feature (12)..(13): 2'-deoxy-2'-fluoro
  misc_feature (14)..(14): 2'-deoxy
  misc_feature (15)..(17): 2'-deoxy-2'-fluoro
  misc_feature (18)..(18): 2'-deoxy
  misc_feature (19)..(19): 2'-deoxy-2'-fluoro
  misc_feature (1)..(19): ribonucleotide unmodified or modified as described for this sequence
  misc_feature (21)..(21): 3'-3 attached terminal deoxyabasic moiety
ugugcuugcugcugucuactt

SEQ ID NO: 3348 - DNA, 21 bp, Artificial sequence
  Synthetic siNA sense region
  misc_feature (1)..(2): 2'-deoxy-2'-fluoro
  misc_feature (1)..(1): 5'-3 attached terminal deoxyabasic moiety
  misc_feature (3)..(3): 2'-deoxy
  misc_feature (4)..(5): 2'-deoxy-2'-fluoro
  misc_feature (6)..(6): 2'-deoxy
  misc_feature (7)..(8): 2'-deoxy-2'-fluoro
  misc_feature (9)..(10): 2'-deoxy
  misc_feature (11)..(11): 2'-deoxy-2'-fluoro
  misc_feature (12)..(12): 2'-deoxy
  misc_feature (13)..(14): 2'-deoxy-2'-fluoro
  misc_feature (15)..(15): 2'-deoxy
  misc_feature (16)..(16): 2'-deoxy-2'-fluoro
  misc_feature (17)..(18): 2'-deoxy
  misc_feature (19)..(19): 2'-deoxy-2'-fluoro
  misc_feature (1)..(19): ribonucleotide unmodified or modified as described for this sequence
  misc_feature (21)..(21): 3'-3 attached terminal deoxyabasic moiety
uugucauuggugcugugautt

SEQ ID NO: 3349 - DNA, 21 bp, Artificial sequence
  Synthetic siNA sense region
  misc_feature: 2'-deoxy-2'-fluoro
  misc_feature (1)..(3): 2'-deoxy
  misc_feature (1)..(1): 5'-3 attached terminal deoxyabasic moiety
  misc_feature (4)..(5): 2'-deoxy-2'-fluoro
  misc_feature (6)..(7): 2'-deoxy
  misc_feature (8)..(10): 2'-deoxy-2'-fluoro
  misc_feature (11)..(15): 2'-deoxy
  misc_feature (16)..(16): 2'-deoxy-2'-fluoro
  misc_feature (17)..(19): 2'-deoxy
  misc_feature (1)..(19): ribonucleotide unmodified or modified as described for this sequence
  misc_feature (21)..(21): 3'-3 attached terminal deoxyabasic moiety
gaaccagcuugagagcaaatt

SEQ ID NO: 3350 - DNA, 21 bp, Artificial sequence
  Synthetic siNA sense region
  misc_feature: 2'-deoxy
  misc_feature (1)..(2): 2'-deoxy-2'-fluoro
  misc_feature (1)..(1): 5'-3 attached terminal deoxyabasic moiety
  misc_feature (3)..(3): 2'-deoxy
  misc_feature (4)..(12): 2'-deoxy-2'-fluoro
  misc_feature (13)..(14): 2'-deoxy
  misc_feature (15)..(19): 2'-deoxy-2'-fluoro
  misc_feature (1)..(19): ribonucleotide unmodified or modified as described for this sequence
  misc_feature (21)..(21): 3'-3 attached terminal deoxyabasic moiety
uuguuuuccucuggcucuutt

SEQ ID NO: 3351 - DNA, 21 bp, Artificial sequence
  Synthetic siNA antisense region
  misc_feature (1)..(1): 2'-deoxy-2'-fluoro
  misc_feature (2)..(3): 2'-deoxy
  misc_feature (4)..(4): 2'-deoxy-2'-fluoro
  misc_feature (5)..(6): 2'-deoxy
  misc_feature (7)..(7): 2'-deoxy-2'-fluoro
  misc_feature (8)..(9): 2'-deoxy
  misc_feature (10)..(16): 2'-deoxy-2'-fluoro
  misc_feature (17)..(17): 2'-deoxy
  misc_feature (18)..(19): 2'-deoxy-2'-fluoro
  misc_feature (1)..(19): ribonucleotide unmodified or modified as described for this sequence
  misc_feature (20)..(20): Phosphorothioate 3'-Internucleotide Linkage
ugauggcaaccucuucauutt

SEQ ID NO: 3352 - DNA, 21 bp, Artificial sequence
  Synthetic siNA antisense region
  misc_feature (1)..(1): 2'-deoxy-2'-fluoro
  misc_feature (2)..(2): 2'-deoxy
  misc_feature (3)..(7): 2'-deoxy-2'-fluoro
  misc_feature (8)..(8): 2'-deoxy
  misc_feature (9)..(9): 2'-deoxy-2'-fluoro
  misc_feature (10)..(14): 2'-deoxy
  misc_feature (15)..(15): 2'-deoxy-2'-fluoro
  misc_feature (16)..(16): 2'-deoxy
  misc_feature (17)..(17): 2'-deoxy-2'-fluoro
  misc_feature (18)..(19): 2'-deoxy
  misc_feature (1)..(19): ribonucleotide unmodified or modified as described for this sequence
  misc_feature (20)..(20): Phosphorothioate 3'-Internucleotide Linkage
cacuccuguggagaugcaatt

SEQ ID NO: 3353 - DNA, 21 bp, Artificial sequence
  Synthetic siNA antisense region
  misc_feature (1)..(2): 2'-deoxy
  misc_feature (3)..(3): 2'-deoxy-2'-fluoro
  misc_feature (4)..(7): 2'-deoxy
  misc_feature (8)..(13): 2'-deoxy-2'-fluoro
  misc_feature (14)..(14): 2'-deoxy
  misc_feature (15)..(18): 2'-deoxy-2'-fluoro
  misc_feature (19)..(19): 2'-deoxy
  misc_feature (1)..(19): ribonucleotide unmodified or modified as described for this sequence
  misc_feature (20)..(20): Phosphorothioate 3'-Internucleotide Linkage
gguaaagucccuugcuuugtt

SEQ ID NO: 3354 - DNA, 21 bp, Artificial sequence
  Synthetic siNA antisense region
  misc_feature (1)..(2): 2'-deoxy
  misc_feature (3)..(3): 2'-deoxy-2'-fluoro
  misc_feature (4)..(4): 2'-deoxy
  misc_feature (5)..(5): 2'-deoxy-2'-fluoro
  misc_feature (6)..(9): 2'-deoxy
  misc_feature (10)..(11): 2'-deoxy-2'-fluoro
  misc_feature (12)..(12): 2'-deoxy
  misc_feature (13)..(15): 2'-deoxy-2'-fluoro
  misc_feature (16)..(16): 2'-deoxy
  misc_feature (17)..(17): 2'-deoxy-2'-fluoro
  misc_feature (18)..(18): 2'-deoxy
  misc_feature (19)..(19): 2'-deoxy-2'-fluoro
  misc_feature (1)..(19): ribonucleotide unmodified or modified as described for this sequence
  misc_feature (20)..(20): Phosphorothioate 3'-Internucleotide Linkage
agcaugaggccauuuacactt

SEQ ID NO: 3355 - DNA, 21 bp, Artificial sequence
  Synthetic siNA antisense region
  misc_feature (1)..(1): 2'-deoxy
  misc_feature (2)..(2): 2'-deoxy-2'-fluoro
  misc_feature (3)..(5): 2'-deoxy
  misc_feature (6)..(6): 2'-deoxy-2'-fluoro
  misc_feature (7)..(8): 2'-deoxy
  misc_feature (9)..(9): 2'-deoxy-2'-fluoro
  misc_feature (10)..(11): 2'-deoxy
  misc_feature (12)..(12): 2'-deoxy-2'-fluoro
  misc_feature (13)..(15): 2'-deoxy
  misc_feature (16)..(16): 2'-deoxy-2'-fluoro
  misc_feature (17)..(17): 2'-deoxy
  misc_feature (18)..(18): 2'-deoxy-2'-fluoro
  misc_feature (19)..(19): 2'-deoxy
  misc_feature (1)..(19): ribonucleotide unmodified or modified as described for this sequence
  misc_feature (20)..(20): Phosphorothioate 3'-Internucleotide Linkage
guagacagcagcaagcacatt

SEQ ID NO: 3356 - DNA, 21 bp, Artificial sequence
  Synthetic siNA antisense region
  misc_feature (1)..(1): 2'-deoxy
  misc_feature (2)..(3): 2'-deoxy-2'-fluoro
  misc_feature (4)..(4): 2'-deoxy
  misc_feature (5)..(5): 2'-deoxy-2'-fluoro
  misc_feature (6)..(7): 2'-deoxy
  misc_feature (8)..(8): 2'-deoxy-2'-fluoro
  misc_feature (9)..(9): 2'-deoxy
  misc_feature (10)..(11): 2'-deoxy-2'-fluoro
  misc_feature (12)..(13): 2'-deoxy
  misc_feature (14)..(14): 2'-deoxy-2'-fluoro
  misc_feature (15)..(16): 2'-deoxy
  misc_feature (17)..(17): 2'-deoxy-2'-fluoro
  misc_feature (18)..(19): 2'-deoxy
  misc_feature (1)..(19): ribonucleotide unmodified or modified as described for this sequence
  misc_feature (20)..(20): Phosphorothioate 3'-Internucleotide Linkage
aucacagcaccaaugacaatt

SEQ ID NO: 3357 - DNA, 21 bp, Artificial sequence
  Synthetic siNA antisense region
  misc_feature (1)..(3): 2'-deoxy-2'-fluoro
  misc_feature (4)..(4): 2'-deoxy
  misc_feature (5)..(9): 2'-deoxy-2'-fluoro
  misc_feature (10)..(12): 2'-deoxy
  misc_feature (13)..(14): 2'-deoxy-2'-fluoro
  misc_feature (15)..(16): 2'-deoxy
  misc_feature (17)..(19): 2'-deoxy-2'-fluoro
  misc_feature (1)..(19): ribonucleotide unmodified or modified as described for this sequence
  misc_feature (20)..(20): Phosphorothioate 3'-Internucleotide Linkage
uuugcucucaagcugguuctt

SEQ ID NO: 3358 - DNA, 21 bp, Artificial sequence
  Synthetic siNA antisense region
  misc_feature (1)..(5): 2'-deoxy
  misc_feature (6)..(7): 2'-deoxy-2'-fluoro
  misc_feature (8)..(16): 2'-deoxy
  misc_feature (17)..(17): 2'-deoxy-2'-fluoro
  misc_feature (18)..(19): 2'-deoxy
  misc_feature (1)..(19): ribonucleotide unmodified or modified as described for this sequence
  misc_feature (20)..(20): Phosphorothioate 3'-Internucleotide Linkage
aagagccagaggaaaacaatt

SEQ ID NO: 3359 - DNA, 21 bp, Artificial sequence
  Synthetic siNA sense region
  misc_feature (1)..(2): 2'-O-methyl
  misc_feature (3)..(3): 2'-deoxy-2'-fluoro
  misc_feature (4)..(10): 2'-O-methyl
  misc_feature (11)..(12): 2'-deoxy-2'-fluoro
  misc_feature (13)..(13): 2'-O-methyl
  misc_feature (14)..(15): 2'-deoxy-2'-fluoro
  misc_feature (16)..(16): 2'-O-methyl
  misc_feature (17)..(18): 2'-deoxy-2'-fluoro
  misc_feature (19)..(19): 2'-O-methyl
  misc_feature (1)..(19): ribonucleotide unmodified or modified as described for this sequence
  misc_feature (20)..(20): Phosphorothioate 3'-Internucleotide Linkage
aaugaagagguugccaucatt

SEQ ID NO: 3360 - DNA, 21 bp, Artificial sequence
  Synthetic siNA sense region
  misc_feature (1)..(2): 2'-deoxy-2'-fluoro
  misc_feature (3)..(3): 2'-O-methyl
  misc_feature (4)..(4): 2'-deoxy-2'-fluoro
  misc_feature (5)..(5): 2'-O-methyl
  misc_feature (6)..(10): 2'-deoxy-2'-fluoro
  misc_feature (11)..(11): 2'-O-methyl
  misc_feature (12)..(12): 2'-deoxy-2'-fluoro
  misc_feature (13)..(17): 2'-O-methyl
  misc_feature (18)..(18): 2'-deoxy-2'-fluoro
  misc_feature (19)..(19): 2'-O-methyl
  misc_feature (1)..(19): ribonucleotide unmodified or modified as described for this sequence
  misc_feature (20)..(20): Phosphorothioate 3'-Internucleotide Linkage
uugcaucuccacaggagugtt

SEQ ID NO: 3361 - DNA, 21 bp, Artificial sequence
  Synthetic siNA sense region
  misc_feature (1)..(1): 2'-deoxy-2'-fluoro
  misc_feature (2)..(5): 2'-O-methyl
  misc_feature (6)..(6): 2'-deoxy-2'-fluoro
  misc_feature (7)..(12): 2'-O-methyl
  misc_feature (13)..(16): 2'-deoxy-2'-fluoro
  misc_feature (17)..(17): 2'-O-methyl
  misc_feature (18)..(19): 2'-deoxy-2'-fluoro
  misc_feature (1)..(19): ribonucleotide unmodified or modified as described for this sequence
  misc_feature (20)..(20): Phosphorothioate 3'-Internucleotide Linkage
caaagcaagggacuuuacctt

SEQ ID NO: 3362 - DNA, 21 bp, Artificial sequence
  Synthetic siNA sense region
  misc_feature (1)..(1): 2'-O-methyl
  misc_feature (2)..(2): 2'-deoxy-2'-fluoro
  misc_feature (3)..(3): 2'-O-methyl
  misc_feature (4)..(4): 2'-deoxy-2'-fluoro
  misc_feature (5)..(7): 2'-O-methyl
  misc_feature (8)..(8): 2'-deoxy-2'-fluoro
  misc_feature (9)..(10): 2'-O-methyl
  misc_feature (11)..(14): 2'-deoxy-2'-fluoro
  misc_feature (15)..(15): 2'-O-methyl
  misc_feature (16)..(16): 2'-deoxy-2'-fluoro
  misc_feature (17)..(17): 2'-O-methyl
  misc_feature (18)..(19): 2'-deoxy-2'-fluoro
  misc_feature (1)..(19): ribonucleotide unmodified or modified as described for this sequence
  misc_feature (20)..(20): Phosphorothioate 3'-Internucleotide Linkage
guguaaauggccucaugcutt

SEQ ID NO: 3363 - DNA, 21 bp, Artificial sequence
  Synthetic siNA sense region
  misc_feature (1)..(1): 2'-deoxy-2'-fluoro
  misc_feature (2)..(2): 2'-O-methyl
  misc_feature (3)..(3): 2'-deoxy-2'-fluoro
  misc_feature (4)..(4): 2'-O-methyl
  misc_feature (5)..(7): 2'-deoxy-2'-fluoro
  misc_feature (8)..(8): 2'-O-methyl
  misc_feature (9)..(10): 2'-deoxy-2'-fluoro
  misc_feature (11)..(11): 2'-O-methyl
  misc_feature (12)..(13): 2'-deoxy-2'-fluoro
  misc_feature (14)..(14): 2'-O-methyl
  misc_feature (15)..(17): 2'-deoxy-2'-fluoro
  misc_feature (18)..(18): 2'-O-methyl
  misc_feature (19)..(19): 2'-deoxy-2'-fluoro
  misc_feature (1)..(19): ribonucleotide unmodified or modified as described for this sequence
  misc_feature (20)..(20): Phosphorothioate 3'-Internucleotide Linkage
ugugcuugcugcugucuactt

SEQ ID NO: 3364 - DNA, 21 bp, Artificial sequence
  Synthetic siNA sense region
  misc_feature (1)..(2): 2'-deoxy-2'-fluoro
  misc_feature (3)..(3): 2'-O-methyl
  misc_feature (4)..(5): 2'-deoxy-2'-fluoro
  misc_feature (6)..(6): 2'-O-methyl
  misc_feature (7)..(8): 2'-deoxy-2'-fluoro
  misc_feature (9)..(10): 2'-O-methyl
  misc_feature (11)..(11): 2'-deoxy-2'-fluoro
  misc_feature (12)..(12): 2'-O-methyl
  misc_feature (13)..(14): 2'-deoxy-2'-fluoro
  misc_feature (15)..(15): 2'-O-methyl
  misc_feature (16)..(16): 2'-deoxy-2'-fluoro
  misc_feature (17)..(18): 2'-O-methyl
  misc_feature (19)..(19): 2'-deoxy-2'-fluoro
  misc_feature (1)..(19): ribonucleotide unmodified or modified as described for this sequence
  misc_feature (20)..(20): Phosphorothioate 3'-Internucleotide Linkage
uugucauuggugcugugautt

SEQ ID NO: 3365 - DNA, 21 bp, Artificial sequence
  Synthetic siNA sense region
  misc_feature: 2'-deoxy-2'-fluoro
  misc_feature (1)..(3): 2'-O-methyl
  misc_feature (4)..(5): 2'-deoxy-2'-fluoro
  misc_feature (6)..(7): 2'-O-methyl
  misc_feature (8)..(10): 2'-deoxy-2'-fluoro
  misc_feature (11)..(15): 2'-O-methyl
  misc_feature (16)..(16): 2'-deoxy-2'-fluoro
  misc_feature (17)..(19): 2'-O-methyl
  misc_feature (1)..(19): ribonucleotide unmodified or modified as described for this sequence
  misc_feature (20)..(20): Phosphorothioate 3'-Internucleotide Linkage
gaaccagcuugagagcaaatt

SEQ ID NO: 3366 - DNA, 21 bp, Artificial sequence
  Synthetic siNA sense region
  misc_feature (1)..(2): 2'-deoxy-2'-fluoro
  misc_feature (3)..(3): 2'-O-methyl
  misc_feature (4)..(12): 2'-deoxy-2'-fluoro
  misc_feature (13)..(14): 2'-O-methyl
  misc_feature (15)..(19): 2'-deoxy-2'-fluoro
  misc_feature (1)..(19): ribonucleotide unmodified or modified as described for this sequence
  misc_feature (20)..(20): Phosphorothioate 3'-Internucleotide Linkage
uuguuuuccucuggcucuutt

SEQ ID NO: 3367 - DNA, 21 bp, Artificial sequence
  Synthetic siNA antisense region
  misc_feature (1)..(1): 2'-deoxy-2'-fluoro
  misc_feature (2)..(3): 2'-O-methyl
  misc_feature (4)..(4): 2'-deoxy-2'-fluoro
  misc_feature (5)..(6): 2'-O-methyl
  misc_feature (7)..(7): 2'-deoxy-2'-fluoro
  misc_feature (8)..(9): 2'-O-methyl
  misc_feature (10)..(16): 2'-deoxy-2'-fluoro
  misc_feature (17)..(17): 2'-O-methyl
  misc_feature (18)..(19): 2'-deoxy-2'-fluoro
  misc_feature (1)..(19): ribonucleotide unmodified or modified as described for this sequence
  misc_feature (20)..(20): Phosphorothioate 3'-Internucleotide Linkage
ugauggcaaccucuucauutt

SEQ ID NO: 3368 - DNA, 21 bp, Artificial sequence
  Synthetic siNA antisense region
  misc_feature (1)..(1): 2'-deoxy-2'-fluoro
  misc_feature (2)..(2): 2'-O-methyl
  misc_feature (2)..(6): 2'-deoxy-2'-fluoro
  misc_feature (3)..(7): 2'-deoxy-2'-fluoro
  misc_feature (8)..(8): 2'-O-methyl
  misc_feature (9)..(9): 2'-deoxy-2'-fluoro
  misc_feature (10)..(14): 2'-O-methyl
  misc_feature (15)..(15): 2'-deoxy-2'-fluoro
  misc_feature (16)..(16): 2'-O-methyl
  misc_feature (17)..(17): 2'-deoxy-2'-fluoro
  misc_feature (18)..(19): 2'-O-methyl
  misc_feature (1)..(19): ribonucleotide unmodified or modified as described for this sequence
  misc_feature (20)..(20): Phosphorothioate 3'-Internucleotide Linkage
cacuccuguggagaugcaatt

SEQ ID NO: 3369 - DNA, 21 bp, Artificial sequence
  Synthetic siNA antisense region
  misc_feature (1)..(2): 2'-O-methyl
  misc_feature (3)..(3): 2'-deoxy-2'-fluoro
  misc_feature (4)..(7): 2'-O-methyl
  misc_feature (8)..(13): 2'-deoxy-2'-fluoro
  misc_feature (14)..(14): 2'-O-methyl
  misc_feature (15)..(18): 2'-deoxy-2'-fluoro
  misc_feature (19)..(19): 2'-O-methyl
  misc_feature (1)..(19): ribonucleotide unmodified or modified as described for this sequence
  misc_feature (20)..(20): Phosphorothioate 3'-Internucleotide Linkage
gguaaagucccuugcuuugtt

SEQ ID NO: 3370 - DNA, 21 bp, Artificial sequence
  Synthetic siNA antisense region
  misc_feature (1)..(2): 2'-O-methyl
  misc_feature (3)..(3): 2'-deoxy-2'-fluoro
  misc_feature (4)..(4): 2'-O-methyl
  misc_feature (5)..(5): 2'-deoxy-2'-fluoro
  misc_feature (6)..(9): 2'-O-methyl
  misc_feature (10)..(11): 2'-deoxy-2'-fluoro
  misc_feature (12)..(12): 2'-O-methyl
  misc_feature (13)..(15): 2'-deoxy-2'-fluoro
  misc_feature (16)..(16): 2'-O-methyl
  misc_feature (17)..(17): 2'-deoxy-2'-fluoro
  misc_feature (18)..(18): 2'-O-methyl
  misc_feature (19)..(19): 2'-deoxy-2'-fluoro
  misc_feature (1)..(19): ribonucleotide unmodified or modified as described for this sequence
  misc_feature (20)..(20): Phosphorothioate 3'-Internucleotide Linkage
agcaugaggccauuuacactt

SEQ ID NO: 3371 - DNA, 21 bp, Artificial sequence
  Synthetic siNA antisense region
  misc_feature (1)..(1): 2'-O-methyl
  misc_feature (2)..(2): 2'-deoxy-2'-fluoro
  misc_feature (3)..(5): 2'-O-methyl
  misc_feature (6)..(6): 2'-deoxy-2'-fluoro
  misc_feature (7)..(8): 2'-O-methyl
  misc_feature (9)..(9): 2'-deoxy-2'-fluoro
  misc_feature (10)..(11): 2'-O-methyl
  misc_feature (12)..(12): 2'-deoxy-2'-fluoro
  misc_feature (13)..(15): 2'-O-methyl
  misc_feature (16)..(16): 2'-deoxy-2'-fluoro
  misc_feature (17)..(17): 2'-O-methyl
  misc_feature (18)..(18): 2'-deoxy-2'-fluoro
  misc_feature (19)..(19): 2'-O-methyl
  misc_feature (1)..(19): ribonucleotide unmodified or modified as described for this sequence
  misc_feature (20)..(20): Phosphorothioate 3'-Internucleotide Linkage
guagacagcagcaagcacatt

SEQ ID NO: 3372 - DNA, 21 bp, Artificial sequence
  Synthetic siNA antisense region
  misc_feature (1)..(1): 2'-O-methyl
  misc_feature (2)..(3): 2'-deoxy-2'-fluoro
  misc_feature (4)..(4): 2'-O-methyl
  misc_feature (5)..(5): 2'-deoxy-2'-fluoro
  misc_feature (6)..(7): 2'-O-methyl
  misc_feature (8)..(8): 2'-deoxy-2'-fluoro
  misc_feature (9)..(9): 2'-O-methyl
  misc_feature (10)..(11): 2'-deoxy-2'-fluoro
  misc_feature (12)..(13): 2'-O-methyl
  misc_feature (14)..(14): 2'-deoxy-2'-fluoro
  misc_feature (15)..(16): 2'-O-methyl
  misc_feature (17)..(17): 2'-deoxy-2'-fluoro
  misc_feature (18)..(19): 2'-O-methyl
  misc_feature (1)..(19): ribonucleotide unmodified or modified as described for this sequence
  misc_feature (20)..(20): Phosphorothioate 3'-Internucleotide Linkage
aucacagcaccaaugacaatt

SEQ ID NO: 3373 - DNA, 21 bp, Artificial sequence
  Synthetic siNA antisense region
  misc_feature (1)..(3): 2'-deoxy-2'-fluoro
  misc_feature (4)..(4): 2'-O-methyl
  misc_feature (5)..(9): 2'-deoxy-2'-fluoro
  misc_feature (10)..(12): 2'-O-methyl
  misc_feature (13)..(14): 2'-deoxy-2'-fluoro
  misc_feature (15)..(16): 2'-O-methyl
  misc_feature (17)..(19): 2'-deoxy-2'-fluoro
  misc_feature (1)..(19): ribonucleotide unmodified or modified as described for this sequence
  misc_feature (20)..(20): Phosphorothioate 3'-Internucleotide Linkage
uuugcucucaagcugguuctt

SEQ ID NO: 3374 - DNA, 21 bp, Artificial sequence
  Synthetic siNA antisense region
  misc_feature (1)..(5): 2'-O-methyl
  misc_feature (6)..(7): 2'-deoxy-2'-fluoro
  misc_feature (8)..(16): 2'-O-methyl
  misc_feature (17)..(17): 2'-deoxy-2'-fluoro
  misc_feature (18)..(19): 2'-O-methyl
  misc_feature (1)..(19): ribonucleotide unmodified or modified as described for this sequence
  misc_feature (20)..(20): Phosphorothioate 3'-Internucleotide Linkage
aagagccagaggaaaacaatt

SEQ ID NO: 3375 - DNA, 21 bp, Artificial Sequence
  Synthetic siNA sense region
  misc_feature (1)..(1): 5'-3 attached terminal deoxyabasic moiety
  misc_feature (1)..(19): ribonucleotide unmodified or modified as described for this sequence
  misc_feature (21)..(21): 3'-3 attached terminal deoxyabasic moiety
  misc_feature (20)..(21): n stands for any nucleotide
nnnnnnnnnnnnnnnnnnnnn

SEQ ID NO: 3376 - DNA, 21 bp, Artificial Sequence
  Synthetic siNA antisense region
  misc_feature (1)..(19): ribonucleotide unmodified or modified as described for this sequence
  misc_feature (20)..(20): Phosphorothioate 3'-Internucleotide Linkage
  misc_feature (20)..(21): n stands for any nucleotide
  misc_feature (21)..(21): attached terminal glyceryl moiety
nnnnnnnnnnnnnnnnnnnnn

SEQ ID NO: 3377 - DNA, 21 bp, Artificial Sequence
  Synthetic siNA sense region
  misc_feature (1)..(19): n stands for any ribonucleotide wherein any pyrimidine nucleotide present is 2'-Fluoro and all purine nucleotide is 2'-o-methyl
  misc_feature (20)..(20): Phosphorothioate 3'-Internucleotide Linkage
  misc_feature (20)..(21): n stands for any nucleotide
nnnnnnnnnnnnnnnnnnnnn

SEQ ID NO: 3378 - DNA, 21 bp, Artificial Sequence
  Synthetic siNA antisense region
  misc_feature (1)..(19): n stands for any ribonucleotide wherein any pyrimidine nucleotide present is 2'-Fluoro and all purine nucleotides are 2'-o-methyl
  misc_feature (20)..(20): Phosphorothioate 3'-Internucleotide Linkage
  misc_feature (20)..(21): n stands for any nucleotide
  misc_feature (21)..(21): attached terminal glyceryl moiety
nnnnnnnnnnnnnnnnnnnnn

SEQ ID NO: 3379 - DNA, 21 bp, Artificial Sequence
  Synthetic siNA sense region
  misc_feature (1)..(19): n stands for any ribonucleotide wherein any pyrimidine nucleotide present is 2'-O-methyl or 2'-Fluoro
  misc_feature (20)..(21): n stands for any nucleotide
  misc_feature (1)..(1): 5'-3 attached terminal deoxyabasic moiety
  misc_feature (21)..(21): 3'-3 attached terminal deoxyabasic moiety
nnnnnnnnnnnnnnnnnnnnn

SEQ ID NO: 3380 - DNA, 21 bp, Artificial Sequence
  Synthetic siNA antisense region
  misc_feature (1)..(19): n stands for any ribonucleotide wherein any pyrimidine nucleotide present is 2'-Fluoro
  misc_feature (20)..(20): Phosphorothioate 3'-Internucleotide Linkage
  misc_feature (20)..(21): n stands for any nucleotide
  misc_feature (21)..(21): attached terminal glyceryl moiety
nnnnnnnnnnnnnnnnnnnnn

SEQ ID NO: 3381 - DNA, 21 bp, Artificial Sequence
  Synthetic siNA sense region
  misc_feature (1)..(19): n stands for any ribonucleotide wherein any pyrimidine nucleotide present is 2'-Fluoro and any purine nucleotide present is 2'-Deoxy
  misc_feature (20)..(21): n stands for any nucleotide
  misc_feature (1)..(1): 5'-3 attached terminal deoxyabasic moiety
  misc_feature (21)..(21): 3'-3 attached terminal deoxyabasic moiety
nnnnnnnnnnnnnnnnnnnnn

SEQ ID NO: 3382 - DNA, 21 bp, Artificial Sequence
  Synthetic siNA sense region
  misc_feature (1)..(19): n stands for any ribonucleotide wherein any pyrimidine nucleotide present is 2'-Fluoro
  misc_feature (20)..(21): n stands for any nucleotide
  misc_feature (1)..(1): 5'-3 attached terminal deoxyabasic moiety
  misc_feature (21)..(21): 3'-3 attached terminal deoxyabasic moiety
nnnnnnnnnnnnnnnnnnnnn

SEQ ID NO: 3383 - DNA, 21 bp, Artificial Sequence
  Synthetic siNA antisense region
  misc_feature (1)..(19): n stands for any ribonucleotide wherein any pyrimidine nucleotide present is 2'-Fluoro and any purine nucleotide present is 2'-deoxy
  misc_feature (20)..(21): n stands for any nucleotide
  misc_feature (20)..(20): Phosphorothioate or Phosphorodithioate 3'-Internucleotide Linkage
  misc_feature (21)..(21): attached terminal glyceryl moiety
nnnnnnnnnnnnnnnnnnnnn

SEQ ID NO: 3384 - DNA, 21 bp, Artificial Sequence
  Synthetic siNA sense region
  misc_feature (1)..(1): 5'-3 attached terminal deoxyabasic moiety
  misc_feature (21)..(21): 3'-3 attached terminal deoxyabasic moiety
  misc_feature (1)..(19): ribonucleotide unmodified or modified as described for this sequence
augugcuugaagauccuugtt

SEQ ID NO: 3385 - DNA, 21 bp, Artificial Sequence
  Synthetic siNA antisense region
  misc_feature (20)..(20): Phosphorothioate or Phosphorodithioate 3'-Internucleotide Linkage
  misc_feature (1)..(19): ribonucleotide unmodified or modified as described for this sequence
  misc_feature (21)..(21): attached terminal glyceryl moiety
caaggaucuucaagcacautt

SEQ ID NO: 3386 - DNA, 21 bp, Artificial Sequence
  Synthetic siNA sense region
  misc_feature (1)..(2): 2'-O-Methyl
  misc_feature (3)..(3): 2'-O-Methyl
  misc_feature (5)..(5): 2'-O-Methyl
  misc_feature (9)..(13): 2'-O-Methyl
  misc_feature (19)..(19): 2'-O-Methyl
  misc_feature (2)..(2): 2'-deoxy-2'-Fluoro
  misc_feature (4)..(4): 2'-deoxy-2'-Fluoro
  misc_feature (6)..(8): 2'-deoxy-2'-Fluoro
  misc_feature (14)..(18): 2'-deoxy-2'-Fluoro
  misc_feature (1)..(19): ribonucleotide unmodified or modified as described for this sequence
augugcuugaagauccuugtt

SEQ ID NO: 3387 - DNA, 21 bp, Artificial Sequence
  Synthetic siNA antisense region
  misc_feature (2)..(6): 2'-O-Methyl
  misc_feature (12)..(14): 2'-O-Methyl
  misc_feature (16)..(16): 2'-O-Methyl
  misc_feature (18)..(18): 2'-O-Methyl
  misc_feature (1)..(1): 2'-deoxy-2'-Fluoro
  misc_feature (7)..(11): 2'-deoxy-2'-Fluoro
  misc_feature (15)..(15): 2'-deoxy-2'-Fluoro
  misc_feature (17)..(17): 2'-deoxy-2'-Fluoro
  misc_feature (19)..(19): 2'-deoxy-2'-Fluoro
  misc_feature (1)..(19): ribonucleotide unmodified or modified as described for this sequence
  misc_feature (20)..(20): Phosphorothioate or Phosphorodithioate 3'-Internucleotide Linkage
  misc_feature (21)..(21): attached terminal glyceryl moiety
caaggaucuucaagcacautt

SEQ ID NO: 3388 - DNA, 21 bp, Artificial Sequence
  Synthetic siNA sense region
  misc_feature (2)..(2): 2'-deoxy-2'-Fluoro
  misc_feature (4)..(4): 2'-deoxy-2'-Fluoro
  misc_feature (6)..(8): 2'-deoxy-2'-Fluoro
  misc_feature (14)..(18): 2'-deoxy-2'-Fluoro
  misc_feature (1)..(1): 5'-3 attached terminal deoxyabasic moiety
  misc_feature (21)..(21): 3'-3 attached terminal deoxyabasic moiety
  misc_feature (1)..(19): ribonucleotide unmodified or modified as described for this sequence
augugcuugaagauccuugtt

SEQ ID NO: 3389 - DNA, 21 bp, Artificial Sequence
  Synthetic siNA antisense region
  misc_feature (1)..(1): 2'-deoxy-2'-Fluoro
  misc_feature (7)..(11): 2'-deoxy-2'-Fluoro
  misc_feature (15)..(15): 2'-deoxy-2'-Fluoro
  misc_feature (17)..(17): 2'-deoxy-2'-Fluoro
  misc_feature (19)..(19): 2'-deoxy-2'-Fluoro
  misc_feature (1)..(19): ribonucleotide unmodified or modified as described for this sequence
  misc_feature (20)..(20): Phosphorothioate or Phosphorodithioate 3'-Internucleotide Linkage
  misc_feature (21)..(21): attached terminal glyceryl moiety
caaggaucuucaagcacautt

SEQ ID NO: 3390 - DNA, 21 bp, Artificial Sequence
  Synthetic siNA sense region
  misc_feature (2)..(2): 2'-deoxy-2'-Fluoro
  misc_feature (4)..(4): 2'-deoxy-2'-Fluoro
  misc_feature (6)..(8): 2'-deoxy-2'-Fluoro
  misc_feature (14)..(18): 2'-deoxy-2'-Fluoro
  misc_feature (1)..(1): 5'-3 attached terminal deoxyabasic moiety
  misc_feature (21)..(21): 3'-3 attached terminal deoxyabasic moiety
  misc_feature (1)..(19): ribonucleotide unmodified or modified as described for this sequence
augugcuugaagauccuugtt

SEQ ID NO: 3391 - DNA, 21 bp, Artificial Sequence
  Synthetic siNA sense region
  misc_feature (2)..(2): 2'-deoxy-2'-Fluoro
  misc_feature (4)..(4): 2'-deoxy-2'-Fluoro
  misc_feature (6)..(8): 2'-deoxy-2'-Fluoro
  misc_feature (14)..(18): 2'-deoxy-2'-Fluoro
  misc_feature (1)..(1): attached terminal glyceryl moiety
  misc_feature (21)..(21): attached terminal glyceryl moiety
  misc_feature (1)..(19): ribonucleotide unmodified or modified as described for this sequence
augugcuugaagauccuugtt

SEQ ID NO: 3392 - DNA, 21 bp, Artificial Sequence
  Synthetic siNA antisense region
  misc_feature (1)..(1): 2'-deoxy-2'-Fluoro
  misc_feature (7)..(11): 2'-deoxy-2'-Fluoro
  misc_feature (15)..(15): 2'-deoxy-2'-Fluoro
  misc_feature (17)..(17): 2'-deoxy-2'-Fluoro
  misc_feature (19)..(19): 2'-deoxy-2'-Fluoro
  misc_feature (1)..(19): ribonucleotide unmodified or modified as described for this sequence
  misc_feature (20)..(20): Phosphorothioate or Phosphorodithioate 3'-Internucleotide Linkage
  misc_feature (21)..(21): attached terminal glyceryl moiety
caaggaucuucaagcacautt

SEQ ID NO: 3393 - RNA, 29736 nt, Homo sapiens
cuacccaggaaaagccaaccaaccucgaucucuuguagaucuguucucuaaacgaacuuuaaaaucuguguagcugucgcucggcugcaugccuagugcaccuacgcaguauaaacaauaauaaauuuuacugucguugacaagaaacgaguaacucgucccucuucugcagacugcuuacgguuucguccguguugcagucgaucaucagcauaccuagguuucguccgggugugaccgaaagguaagauggagagccuuguucuuggugucaacgagaaaacacacguccaacucaguuugccuguccuucagguuagagacgugcuagugcguggcuucggggacucuguggaagaggcccuaucggaggcacgugaacaccucaaaaauggcacuuguggucuaguagagcuggaaaaaggcguacugccccagcuugaacagcccuauguguucauuaaacguucugaugccuuaagcaccaaucacggccacaaggucguugagcugguugcagaaauggacggcauucaguacggucguagcgguauaacacugggaguacucgugccacaugugggcgaaaccccaauugcauaccgcaauguucuucuucguaagaacgguaauaagggagccgguggucauagcuauggcaucgaucuaaagucuuaugacuuaggugacgagcuuggcacugaucccauugaagauuaugaacaaaacuggaacacuaagcauggcaguggugcacuccgugaacucacucgugagcucaauggaggugcagucacucgcuaugucgacaacaauuucuguggcccagauggguacccucuugauugcaucaaagauuuucucgcacgcgcgggcaagucaaugugcacucuuuccgaacaacuugauuacaucgagucgaagagaggugucuacugcugccgugaccaugagcaugaaauugccugguucacugagcgcucugauaagagcuacgagcaccagacacccuucgaaauuaagagugccaagaaauuugacacuuucaaaggggaaugcccaaaguuuguguuuccucuuaacucaaaagucaaagucauucaaccacguguugaaaagaaaaagacugaggguuucauggggcguauacgcucuguguacccuguugcaucuccacaggaguguaacaauaugcacuugucuaccuugaugaaauguaaucauugcgaugaaguuucauggcagacgugcgacuuucugaaagccacuugugaacauuguggcacugaaaauuuaguuauugaaggaccuacuacauguggguaccuaccuacuaaugcuguagugaaaaugccauguccugccugucaagacccagagauuggaccugagcauaguguugcagauuaucacaaccacucaaacauugaaacucgacuccgcaagggagguaggacuagauguuuuggaggcuguguguuugccuauguuggcugcuauaauaagcgugccuacuggguuccucgugcuagugcugauauuggcucaggccauacuggcauuacuggugacaauguggagaccuugaaugaggaucuccuugagauacugagucgugaacguguuaacauuaacauuguuggcgauuuucauuugaaugaagagguugccaucauuuuggcaucuuucucugcuucuacaagugccuuuauugacacuauaaagagucuugauuacaagucuuucaaaaccauuguugaguccugcgguaacuauaaaguuaccaagggaaagcccguaaaaggugcuuggaacauuggacaacagagaucaguuuuaacaccacugugugguuuucccucacaggcugcugguguuaucagaucaauuuuugcgcgcacacuugaugcagcaaaccacucaauuccugauuugcaaagagcagcugucaccauacuugaugguauuucugaacagucauuacgucuugucgacgccaugguuuauacuucagaccugcucaccaacagugucauuauuauggcauauguaacugguggucuuguacaacagacuucucagugguugucuaaucuuuugggcacuacuguugaaaaacucaggccuaucuuugaauggauugaggcgaaacuuagugcaggaguugaauuucucaaggaugcuugggagauucucaaauuucucauuacagguguuuuugacaucgucaagggucaaauacagguugcuucagauaacaucaaggauuguguaaaaugcuucauugauguuguuaacaaggcacucgaaaugugcauugaucaagucacuaucgcuggcgcaaaguugcgaucacucaacuuaggugaagucuucaucgcucaaagcaagggacuuuaccgucaguguauacguggcaaggagcagcugcaacuacucaugccucuuaaggcaccaaaagaaguaaccuuucuugaaggugauucacaugacacaguacuuaccucugaggagguuguucucaagaacggugaacucgaagcacucgagacgcccguugauagcuucacaaauggagcuaucgucggcacaccagucuguguaaauggccucaugcucuuagagauuaaggacaaagaacaauacugcgcauugucuccugguuuacuggcuacaaacaaugucuuucgcuuaaaagggggugcaccaauuaaagguguaaccuuuggagaagauacuguuugggaaguucaagguuacaagaaugugagaaucacauuugagcuugaugaacguguugacaaagugcuuaaugaaaagugcucugucuacacuguugaauccgguaccgaaguuacugaguuugcauguguuguagcagaggcuguugugaagacuuuacaaccaguuucugaucuccuuaccaacauggguauugaucuugaugaguggaguguagcuacauucuacuuauuugaugaugcuggugaagaaaacuuuucaucacguauguauuguuccuuuuacccuccagaugaggaagaagaggacgaugcagagugugaggaagaagaaauugaugaaaccugugaacaugaguacgguacagaggaugauuaucaaggucucccucuggaauuuggugccucagcugaaacaguucgaguugaggaagaagaagaggaagacuggcuggaugauacuacugagcaaucagagauugagccagaaccagaaccuacaccugaagaaccaguuaaucaguuuacugguuauuuaaaacuuacugacaauguugccauuaaauguguugacaucguuaaggaggcacaaagugcuaauccuauggugauuguaaaugcugcuaacauacaccugaaacaugguggugguguagcaggugcacucaacaaggcaaccaauggugccaugcaaaaggagagugaugauuacauuaagcuaaauggcccucuuacaguaggagggucuuguuugcuuucuggacauaaucuugcuaagaagugucugcauguuguuggaccuaaccuaaaugcaggugaggacauccagcuucuuaaggcagcauaugaaaauuucaauucacaggacaucuuacuugcaccauuguugucagcaggcauauuuggugcuaaaccacuucagucuuuacaagugugcgugcagacgguucguacacagguuuauauugcagucaaugacaaagcucuuuaugagcagguugucauggauuaucuugauaaccugaagccuagaguggaagcaccuaaacaagaggagccaccaaacacagaagauuccaaaacugaggagaaaucugucguacagaagccugucgaugugaagccaaaaauuaaggccugcauugaugagguuaccacaacacuggaagaaacuaaguuucuuaccaauaaguuacucuuguuugcugauaucaaugguaagcuuuaccaugauucucagaacaugcuuagaggugaagauaugucuuuccuugagaaggaugcaccuuacaugguaggugauguuaucacuaguggugauaucacuuguguuguaauacccuccaaaaaggcugguggcacuacugagaugcucucaagagcuuugaagaaagugccaguugaugaguauauaaccacguacccuggacaaggaugugcugguuauacacuugaggaagcuaagacugcucuuaagaaaugcaaaucugcauuuuauguacuaccuucagaagcaccuaaugcuaaggaagagauucuaggaacuguauccuggaauuugagagaaaugcuugcucaugcugaagagacaagaaaauuaaugccuauaugcauggauguuagagccauaauggcaaccauccaacguaaguauaaaggaauuaaaauucaagagggcaucguugacuaugguguccgauucuucuuuuauacuaguaaagagccuguagcuucuauuauuacgaagcugaacucucuaaaugagccgcuugucacaaugccaauugguuaugugacacaugguuuuaaucuugaagaggcugcgcgcuguaugcguucucuuaaagcuccugccguagugucaguaucaucaccagaugcuguuacuacauauaauggauaccucacuucgucaucaaagacaucugaggagcacuuuguagaaacaguuucuuuggcuggcucuuacagagauugguccuauucaggacagcguacagaguuagguguugaauuucuuaagcguggugacaaaauuguguaccacacucuggagagccccgucgaguuucaucuugacggugagguucuuucacuugacaaacuaaagagucucuuaucccugcgggagguuaagacuauaaaaguguucacaacuguggacaacacuaaucuccacacacagcuuguggauaugucuaugacauauggacagcaguuugguccaacauacuuggauggugcugauguuacaaaaauuaaaccucauguaaaucaugaggguaagacuuucuuuguacuaccuagugaugacacacuacguagugaagcuuucgaguacuaccauacucuugaugagaguuuucuugguagguacaugucugcuuuaaaccacacaaagaaauggaaauuuccucaaguuggugguuuaacuucaauuaaaugggcugauaacaauuguuauuugucuaguguuuuauuagcacuucaacagcuugaagucaaauucaaugcaccagcacuucaagaggcuuauuauagagcccgugcuggugaugcugcuaacuuuugugcacucauacucgcuuacaguaauaaaacuguuggcgagcuuggugaugucagagaaacuaugacccaucuucuacagcaugcuaauuuggaaucugcaaagcgaguucuuaaugugguguguaaacauuguggucagaaaacuacuaccuuaacggguguagaagcugugauguauauggguacucuaucuuaugauaaucuuaagacagguguuuccauuccauguguguguggucgugaugcuacacaauaucuaguacaacaagagucuucuuuuguuaugaugucugcaccaccugcugaguauaaauuacagcaagguacauucuuaugugcgaaugaguacacugguaacuaucaguguggucauuacacucauauaacugcuaaggagacccucuaucguauugacggagcucaccuuacaaagaugucagaguacaaaggaccagugacugauguuuucuacaaggaaacaucuuacacuacaaccaucaagccugugucguauaaacucgauggaguuacuuacacagagauugaaccaaaauuggauggguauuauaaaaaggauaaugcuuacuauacagagcagccuauagaccuuguaccaacucaaccauuaccaaaugcgaguuuugauaauuucaaacucacauguucuaacacaaaauuugcugaugauuuaaaucaaaugacaggcuucacaaagccagcuucacgagagcuaucugucacauucuucccagacuugaauggcgauguaguggcuauugacuauagacacuauucagcgaguuucaagaaaggugcuaaauuacugcauaagccaauuguuuggcacauuaaccaggcuacaaccaagacaacguucaaaccaaacacuugguguuuacguugucuuuggaguacaaagccaguagauacuucaaauucauuugaaguucuggcaguagaagacacacaaggaauggacaaucuugcuugugaaagucaacaacccaccucugaagaaguaguggaaaauccuaccauacagaaggaagucauagagugugacgugaaaacuaccgaaguuguaggcaaugucauacuuaaaccaucagaugaagguguuaaaguaacacaagaguuaggucaugaggaucuuauggcugcuuauguggaaaacacaagcauuaccauuaagaaaccuaaugagcuuucacuagccuuagguuuaaaaacaauugccacucaugguauugcugcaauuaauaguguuccuuggaguaaaauuuuggcuuaugucaaaccauucuuaggacaagcagcaauuacaacaucaaauugcgcuaagagauuagcacaacguguguuuaacaauuauaugccuuauguguuuacauuauuguuccaauuguguacuuuuacuaaaaguaccaauucuagaauuagagcuucacuaccuacaacuauugcuaaaaauaguguuaagaguguugcuaaauuauguuuggaugccggcauuaauuaugugaagucacccaaauuuucuaaauuguucacaaucgcuauguggcuauuguuguuaaguauuugcuuagguucucuaaucuguguaacugcugcuuuugguguacucuuaucuaauuuuggugcuccuucuuauuguaauggcguuagagaauuguaucuuaauucgucuaacguuacuacuauggauuucugugaagguucuuuuccuugcagcauuuguuuaaguggauuagacucccuugauucuuauccagcucuugaaaccauucaggugacgauuucaucguacaagcuagacuugacaauuuuaggucuggccgcugaguggguuuuggcauauauguuguucacaaaauucuuuuauuuauuaggucuuucagcuauaaugcagguguucuuuggcuauuuugcuagucauuucaucagcaauucuuggcucaugugguuuaucauuaguauuguacaaauggcacccguuucugcaaugguuaggauguacaucuucuuugcuucuuucuacuacauauggaagagcuauguucauaucauggaugguugcaccucuucgacuugcaugaugugcuauaagcgcaaucgugccacacgcguugaguguacaacuauuguuaauggcaugaagagaucuuucuaugucuaugcaaauggaggccguggcuucugcaagacucacaauuggaauugucucaauugugacacauuuugcacugguaguacauucauuagugaugaaguugcucgugauuugucacuccaguuuaaaagaccaaucaacccuacugaccagucaucguauauuguugauaguguugcugugaaaaauggcgcgcuucaccucuacuuugacaaggcuggucaaaagaccuaugagagacauccgcucucccauuuugucaauuuagacaauuugagagcuaacaacacuaaagguucacugccuauuaaugucauaguuuuugauggcaaguccaaaugcgacgagucugcuucuaagucugcuucuguguacuacagucagcugaugugccaaccuauucuguugcuugaccaagcucuuguaucagacguuggagauaguacugaaguuuccguuaagauguuugaugcuuaugucgacaccuuuucagcaacuuuuaguguuccuauggaaaaacuuaaggcacuuguugcuacagcucacagcgaguuagcaaaggguguagcuuuagaugguguccuuucuacauucgugucagcugcccgacaagguguuguugauaccgauguugacacaaaggauguuauugaaugucucaaacuuucacaucacucugacuuagaagugacaggugacaguuguaacaauuucaugcucaccuauaauaagguugaaaacaugacgcccagagaucuuggcgcauguauugacuguaaugcaaggcauaucaaugcccaaguagcaaaaagucacaauguuucacucaucuggaauguaaaagacuacaugucuuuaucugaacagcugcguaaacaaauucguagugcugccaagaagaacaacauaccuuuuagacuaacuugugcuacaacuagacagguugucaaugucauaacuacuaaaaucucacucaagggugguaagauuguuaguacuuguuuuaaacuuaugcuuaaggccacauuauugugcguucuugcugcauugguuuguuauaucguuaugccaguacauacauugucaauccaugaugguuacacaaaugaaaucauugguuacaaagccauucaggauggugucacucgugacaucauuucuacugaugauuguuuugcaaauaaacaugcugguuuugacgcaugguuuagccagcguggugguucauacaaaaaugacaaaagcugcccuguaguagcugcuaucauuacaagagagauugguuucauagugccuggcuuaccggguacugugcugagagcaaucaauggugacuucuugcauuuucuaccucguguuuuuagugcuguuggcaacauuugcuacacaccuuccaaacucauugaguauagugauuuugcuaccucugcuugcguucuugcugcugaguguacaauuuuuaaggaugcuaugggcaaaccugugccauauuguuaugacacuaauuugcuagaggguucuauuucuuauagugagcuucguccagacacucguuaugugcuuauggaugguuccaucauacaguuuccuaacacuuaccuggaggguucuguuagaguaguaacaacuuuugaugcugaguacuguagacaugguacaugcgaaaggucagaaguagguauuugccuaucuaccagugguagauggguucuuaauaaugagcauuacagagcucuaucaggaguuuucugugguguugaugcgaugaaucucauagcuaacaucuuuacuccucuugugcaaccugugggugcuuuagaugugucugcuucaguaguggcuggugguauuauugccauauuggugacuugugcugccuacuacuuuaugaaauucagacguguuuuuggugaguacaaccauguuguugcugcuaaugcacuuuuguuuuugaugucuuucacuauacucugucugguaccagcuuacagcuuucugccgggagucuacucagucuuuuacuuguacuugacauucuauuucaccaaugauguuucauucuuggcucaccuucaaugguuugccauguuuucuccuauugugccuuuuuggauaacagcaaucuauguauucuguauuucucugaagcacugccauugguucuuuaacaacuaucuuaggaaaagagucauguuuaauggaguuacauuuaguaccuucgaggaggcugcuuuguguaccuuuuugcucaacaaggaaauguaccuaaaauugcguagcgagacacuguugccacuuacacaguauaacagguaucuugcucuauauaacaaguacaaguauuucaguggagccuuagauacuaccagcuaucgugaagcagcuugcugccacuuagcaaaggcucuaaaugacuuuagcaacucaggugcugauguucucuaccaaccaccacagacaucaaucacuucugcuguucugcagagugguuuuaggaaaauggcauucccgucaggcaaaguugaagggugcaugguacaaguaaccuguggaacuacaacucuuaauggauugugguuggaugacacaguauacuguccaagacaugucauuugcacagcagaagacaugcuuaauccuaacuaugaagaucugcucauucgcaaauccaaccauagcuuucuuguucaggcuggcaauguucaacuucguguuauuggccauucuaugcaaaauugucugcuuaggcuuaaaguugauacuucuaacccuaagacacccaaguauaaauuuguccguauccaaccuggucaaacauuuucaguucuagcaugcuacaaugguucaccaucugguguuuaucagugugccaugagaccuaaucauaccauuaaagguucuuuccuuaauggaucaugugguaguguugguuuuaacauugauuaugauugcgugucuuucugcuauaugcaucauauggagcuuccaacaggaguacacgcugguacugacuuagaagguaaauucuaugguccauuuguugacagacaaacugcacaggcugcagguacagacacaaccauaacauuaaauguuuuggcauggcuguaugcugcuguuaucaauggugauaggugguuucuuaauagauucaccacuacuuugaaugacuuuaaccuuguggcaaugaaguacaacuaugaaccuuugacacaagaucauguugacauauugggaccucuuucugcucaaacaggaauugccgucuuagauaugugugcugcuuugaaagagcugcugcagaaugguaugaauggucguacuauccuugguagcacuauuuuagaagaugaguuuacaccauuugauguuguuagacaaugcucugguguuaccuuccaagguaaguucaagaaaauuguuaagggcacucaucauuggaugcuuuuaacuuucuugacaucacuauugauucuuguucaaaguacacaguggucacuguuuuucuuuguuuacgagaaugcuuucuugccauuuacucuugguauuauggcaauugcugcaugugcuaugcugcuuguuaagcauaagcacgcauucuugugcuuguuucuguuaccuucucuugcaacaguugcuuacuuuaauauggucuacaugccugcuagcugggugaugcguaucaugacauggcuugaauuggcugacacuagcuugucugguuauaggcuuaaggauuguguuauguaugcuucagcuuuaguuuugcuuauucucaugacagcucgcacuguuuaugaugaugcugcuagacguguuuggacacugaugaaugucauuacacuuguuuacaaagucuacuaugguaaugcuuuagaucaagcuauuuccaugugggccuuaguuauuucuguaaccucuaacuauucuggugucguuacgacuaucauguuuuuagcuagagcuauaguguuuguguguguugaguauuacccauuguuauuuauuacuggcaacaccuuacaguguaucaugcuuguuuauuguuucuuaggcuauuguugcugcugcuacuuuggccuuuucuguuuacucaaccguuacuucaggcuuacucuugguguuuaugacuacuuggucucuacacaagaauuuagguauaugaacucccaggggcuuuugccuccuaagaguaguauugaugcuuucaagcuuaacauuaaguuguuggguauuggagguaaaccauguaucaagguugcuacuguacagucuaaaaugucugacguaaagugcacaucugugguacugcucucgguucuucaacaacuuagaguagagucaucuucuaaauugugggcacaauguguacaacuccacaaugauauucuucuugcaaaagacacaacugaagcuuucgagaagaugguuucucuuuugucuguuuugcuauccaugcagggugcuguagacauuaauagguugugcgaggaaaugcucgauaaccgugcuacucuucaggcuauugcuucagaauuuaguucuuuaccaucauaugccgcuuaugccacugcccaggaggccuaugagcaggcuguagcuaauggugauucugaagucguucucaaaaaguuaaagaaaucuuugaauguggcuaaaucugaguuugaccgugaugcugccaugcaacgcaaguuggaaaagauggcagaucaggcuaugacccaaauguacaaacaggcaagaucugaggacaagagggcaaaaguaacuagugcuaugcaaacaaugcucuucacuaugcuuaggaagcuugauaaugaugcacuuaacaacauuaucaacaaugcgcgugaugguuguguuccacucaacaucauaccauugacuacagcagccaaacucaugguuguugucccugauuaugguaccuacaagaacacuugugaugguaacaccuuuacauaugcaucugcacucugggaaauccagcaaguuguugaugcggauagcaagauuguucaacuuagugaaauuaacauggacaauucaccaaauuuggcuuggccucuuauuguuacagcucuaagagccaacucagcuguuaaacuacagaauaaugaacugaguccaguagcacuacgacagauguccugugcggcugguaccacacaaacagcuuguacugaugacaaugcacuugccuacuauaacaauucgaagggagguagguuugugcuggcauuacuaucagaccaccaagaucucaaaugggcuagauucccuaagagugaugguacagguacaauuuacacagaacuggaaccaccuuguagguuuguuacagacacaccaaaagggccuaaagugaaauacuuguacuucaucaaaggcuuaaacaaccuaaauagagguauggugcugggcaguuuagcugcuacaguacgucuucaggcuggaaaugcuacagaaguaccugccaauucaacugugcuuuccuucugugcuuuugcaguagacccugcuaaagcauauaaggauuaccuagcaaguggaggacaaccaaucaccaacugugugaagauguuguguacacacacugguacaggacaggcaauuacuguaacaccagaagcuaacauggaccaagaguccuuugguggugcuucauguugucuguauuguagaugccacauugaccauccaaauccuaaaggauucugugacuugaaagguaaguacguccaaauaccuaccacuugugcuaaugacccaguggguuuuacacuuagaaacacagucuguaccgucugcggaauguggaaagguuauggcuguaguugugaccaacuccgcgaacccuugaugcagucugcggaugcaucaacguuuuuaaacggguuugcgguguaagugcagcccgucuuacaccgugcggcacaggcacuaguacugaugucgucuacagggcuuuugauauuuacaacgaaaaaguugcugguuuugcaaaguuccuaaaaacuaauugcugucgcuuccaggagaaggaugaggaaggcaauuuauuagacucuuacuuuguaguuaagaggcauacuaugucuaacuaccaacaugaagagacuauuuauaacuugguuaaagauuguccagcgguugcuguccaugacuuuuucaaguuuagaguagauggugacaugguaccacauauaucacgucagcgucuaacuaaauacacaauggcugauuuagucuaugcucuacgucauuuugaugaggguaauugugauacauuaaaagaaauacucgucacauacaauugcugugaugaugauuauuucaauaagaaggauugguaugacuucguagagaauccugacaucuuacgcguauaugcuaacuuaggugagcguguacgccaaucauuauuaaagacuguacaauucugcgaugcuaugcgugaugcaggcauuguaggcguacugacauuagauaaucaggaucuuaaugggaacugguacgauuucggugauuucguacaaguagcaccaggcugcggaguuccuauuguggauucauauuacucauugcugaugcccauccucacuuugacuagggcauuggcugcugagucccauauggaugcugaucucgcaaaaccacuuauuaagugggauuugcugaaauaugauuuuacggaagagagacuuugucucuucgaccguuauuuuaaauauugggaccagacauaccaucccaauuguauuaacuguuuggaugauagguguauccuucauugugcaaacuuuaauguguuauuuucuacuguguuuccaccuacaaguuuuggaccacuaguaagaaaaauauuuguagaugguguuccuuuuguuguuucaacuggauaccauuuucgugaguuaggagucguacauaaucaggauguaaacuuacauagcucgcgucucaguuucaaggaacuuuuaguguaugcugcugauccagcuaugcaugcagcuucuggcaauuuauugcuagauaaacgcacuacaugcuuuucaguagcugcacuaacaaacaauguugcuuuucaaacugucaaacccgguaauuuuaauaaagacuuuuaugacuuugcugugucuaaagguuucuuuaaggaaggaaguucuguugaacuaaaacacuucuucuuugcucaggauggcaacgcugcuaucagugauuaugacuauuaucguuauaaucugccaacaaugugugauaucagacaacuccuauucguaguugaaguuguugauaaauacuuugauuguuacgaugguggcuguauuaaugccaaccaaguaaucguuaacaaucuggauaaaucagcugguuucccauuuaauaaaugggguaaggcuagacuuuauuaugacucaaugaguuaugaggaucaagaugcacuuuucgcguauacuaagcguaaugucaucccuacuauaacucaaaugaaucuuaaguaugccauuagugcaaagaauagagcucgcaccguagcuggugucucuaucuguaguacuaugacaaauagacaguuucaucagaaauuauugaagucaauagccgccacuagaggagcuacugugguaauuggaacaagcaaguuuuacgguggcuggcauaauauguuaaaaacuguuuacagugauguagaaacuccacaccuuauggguugggauuauccaaaaugugacagagccaugccuaacaugcuuaggauaauggccucucuuguucuugcucgcaaacauaacacuugcuguaacuuaucacaccguuucuacagguuagcuaacgagugugcgcaaguauuaagugagauggucauguguggcggcucacuauauguuaaaccagguggaacaucauccggugaugcuacaacugcuuaugcuaauagugucuuuaacauuugucaagcuguuacagccaauguaaaugcacuucuuucaacugaugguaauaagauagcugacaaguauguccgcaaucuacaacacaggcucuaugagugucucuauagaaauagggauguugaucaugaauucguggaugaguuuuacgcuuaccugcguaaacauuucuccaugaugauucuuucugaugaugccguugugugcuauaacaguaacuaugcggcucaagguuuaguagcuagcauuaagaacuuuaaggcaguucuuuauuaucaaaauaauguguucaugucugaggcaaaauguuggacugagacugaccuuacuaaaggaccucacgaauuuugcucacagcauacaaugcuaguuaaacaaggagaugauuacguguaccugccuuacccagauccaucaagaauauuaggcgcaggcuguuuugucgaugauauugucaaaacagaugguacacuuaugauugaaagguucgugucacuggcuauugaugcuuacccacuuacaaaacauccuaaucaggaguaugcugaugucuuucacuuguauuuacaauacauuagaaaguuacaugaugagcuuacuggccacauguuggacauguauuccguaaugcuaacuaaugauaacaccucacgguacugggaaccugaguuuuaugaggcuauguacacaccacauacagucuugcaggcuguaggugcuuguguauugugcaauucacagacuucacuucguugcggugccuguauuaggagaccauuccuauguugcaagugcugcuaugaccaugucauuucaacaucacacaaauuaguguugucuguuaaucccuauguuugcaaugccccagguugugaugucacugaugugacacaacuguaucuaggagguaugagcuauuauugcaagucacauaagccucccauuaguuuuccauuaugugcuaauggucagguuuuugguuuauacaaaaacacauguguaggcagugacaaugucacugacuucaaugcgauagcaacaugugauuggacuaaugcuggcgauuacauacuugccaacacuuguacugagagacucaagcuuuucgcagcagaaacgcucaaagccacugaggaaacauuuaagcugucauaugguauugccacuguacgcgaaguacucucugacagagaauugcaucuuucaugggagguuggaaaaccuagaccaccauugaacagaaacuaugucuuuacugguuaccguguaacuaaaaauaguaaaguacagauuggagaguacaccuuugaaaaaggugacuauggugaugcuguuguguacagagguacuacgacauacaaguugaauguuggugauuacuuuguguugacaucucacacuguaaugccacuuagugcaccuacucuagugccacaagagcacuaugugagaauuacuggcuuguacccaacacucaacaucucagaugaguuuucuagcaauguugcaaauuaucaaaaggucggcaugcaaaaguacucuacacuccaaggaccaccugguacugguaagagucauuuugccaucggacuugcucucuauuacccaucugcucgcauaguguauacggcaugcucucaugcagcuguugaugcccuaugugaaaaggcauuaaaauauuugcccauagauaaauguaguagaaucauaccugcgcgugcgcgcguagaguguuuugauaaauucaaagugaauucaacacuagaacaguauguuuucugcacuguaaaugcauugccagaaacaacugcugacauuguagucuuugaugaaaucucuauggcuacuaauuaugacuugaguguugucaaugcuagacuucgugcaaaacacuacgucuauauuggcgauccugcucaauuaccagccccccgcacauugcugacuaaaggcacacuagaaccagaauauuuuaauucagugugcagacuuaugaaaacaauagguccagacauguuccuuggaacuugucgccguuguccugcugaaauuguugacacugugagugcuuuaguuuaugacaauaagcuaaaagcacacaaggauaagucagcucaaugcuucaaaauguucuacaaagguguuauuacacaugauguuucaucugcaaucaacagaccucaaauaggcguuguaagagaauuucuuacacgcaauccugcuuggagaaaagcuguuuuuaucucaccuuauaauucacagaacgcuguagcuucaaaaaucuuaggauugccuacgcagacuguugauucaucacaggguucugaauaugacuaugucauauucacacaaacuacugaaacagcacacucuuguaaugucaaccgcuucaauguggcuaucacaagggcaaaaauuggcauuuugugcauaaugucugauagagaucuuuaugacaaacugcaauuuacaagucuagaaauaccacgucgcaauguggcuacauuacaagcagaaaauguaacuggacuuuuuaaggacuguaguaagaucauuacuggucuucauccuacacaggcaccuacacaccucagcguugauauaaaguucaagacugaaggauuauguguugacauaccaggcauaccaaaggacaugaccuaccguagacucaucucuaugauggguuucaaaaugaauuaccaagucaaugguuacccuaauauguuuaucacccgcgaagaagcuauucgucacguucgugcguggauuggcuuugauguagagggcugucaugcaacuagagaugcuguggguacuaaccuaccucuccagcuaggauuuucuacagguguuaacuuaguagcuguaccgacugguuauguugacacugaaaauaacacagaauucaccagaguuaaugcaaaaccuccaccaggugaccaguuuaaacaucuuauaccacucauguauaaaggcuugcccuggaauguagugcguauuaagauaguacaaaugcucagugauacacugaaaggauugucagacagagucguguucguccuuugggcgcauggcuuugagcuuacaucaaugaaguacuuugucaagauuggaccugaaagaacguguugucugugugacaaacgugcaacuugcuuuucuacuucaucagauacuuaugccugcuggaaucauucuguggguuuugacuaugucuauaacccauuuaugauugauguucagcaguggggcuuuacggguaaccuucagaguaaccaugaccaacauugccagguacauggaaaugcacauguggcuaguugugaugcuaucaugacuagauguuuagcaguccaugagugcuuuguuaagcgcguugauuggucuguugaauacccuauuauaggagaugaacugaggguuaauucugcuugcagaaaaguacaacacaugguugugaagucugcauugcuugcugauaaguuuccaguucuucaugacauuggaaauccaaaggcuaucaagugugugccucaggcugaaguagaauggaaguucuacgaugcucagccauguagugacaaagcuuacaaaauagaggaacucuucuauucuuaugcuacacaucacgauaaauucacugaugguguuuguuuguuuuggaauuguaacguugaucguuacccagccaaugcaauuguguguagguuugacacaagagucuugucaaacuugaacuuaccaggcugugauggugguaguuuguaugugaauaagcaugcauuccacacuccagcuuucgauaaaagugcauuuacuaauuuaaagcaauugccuuucuuuuacuauucugauaguccuugugagucucauggcaaacaaguagugucggauauugauuauguuccacucaaaucugcuacguguauuacacgaugcaauuuagguggugcuguuugcagacaccaugcaaaugaguaccgacaguacuuggaugcauauaauaugaugauuucugcuggauuuagccuauggauuuacaaacaauuugauacuuauaaccuguggaauacauuuaccagguuacagaguuuagaaaauguggcuuauaauguuguuaauaaaggacacuuugauggacacgccggcgaagcaccuguuuccaucauuaauaaugcuguuuacacaaagguagaugguauugauguggagaucuuugaaaauaagacaacacuuccuguuaauguugcauuugagcuuugggcuaagcguaacauuaaaccagugccagagauuaagauacucaauaauuuggguguugauaucgcugcuaauacuguaaucugggacuacaaaagagaagccccagcacauguaucuacaauaggugucugcacaaugacugacauugccaagaaaccuacugagagugcuuguucuucacuuacugucuuguuugaugguagaguggaaggacagguagaccuuuuuagaaacgcccguaaugguguuuuaauaacagaagguucagucaaaggucuaacaccuucaaagggaccagcacaagcuagcgucaauggagucacauuaauuggagaaucaguaaaaacacaguuuaacuacuuuaagaaaguagacggcauuauucaacaguugccugaaaccuacuuuacucagagcagagacuuagaggauuuuaagcccagaucacaaauggaaacugacuuucucgagcucgcuauggaugaauucauacagcgauauaagcucgagggcuaugccuucgaacacaucguuuauggagauuucagucauggacaacuuggcggucuucauuuaaugauaggcuuagccaagcgcucacaagauucaccacuuaaauuagaggauuuuaucccuauggacagcacagugaaaaauuacuucauaacagaugcgcaaacagguucaucaaaauguguguguucugugauugaucuuuuacuugaugacuuugucgagauaauaaagucacaagauuugucagugauuucaaaaguggucaagguuacaauugacuaugcugaaauuucauucaugcuuugguguaaggauggacauguugaaaccuucuacccaaaacuacaagcaagucgagcguggcaaccagguguugcgaugccuaacuuguacaagaugcaaagaaugcuucuugaaaagugugaccuucagaauuauggugaaaaugcuguuauaccaaaaggaauaaugaugaaugucgcaaaguauacucaacugugucaauacuuaaauacacuuacuuuagcuguacccuacaacaugagaguuauucacuuuggugcuggcucugauaaaggaguugcaccagguacagcugugcucagacaaugguugccaacuggcacacuacuugucgauucagaucuuaaugacuucgucuccgacgcauauucuacuuuaauuggagacugugcaacaguacauacggcuaauaaaugggaccuuauuauuagcgauauguaugacccuaggaccaaacaugugacaaaagagaaugacucuaaagaaggguuuuucacuuaucuguguggauuuauaaagcaaaaacuagcccugggugguucuauagcuguaaagauaacagagcauucuuggaaugcugaccuuuacaagcuuaugggccauuucucaugguggacagcuuuuguuacaaauguaaaugcaucaucaucggaagcauuuuuaauuggggcuaacuaucuuggcaagccgaaggaacaaauugauggcuauaccaugcaugcuaacuacauuuucuggaggaacacaaauccuauccaguugucuuccuauucacucuuugacaugagcaaauuuccucuuaaauuaagaggaacugcuguaaugucucuuaaggagaaucaaaucaaugauaugauuuauucucuucuggaaaaagguaggcuuaucauuagagaaaacaacagaguugugguuucaagugauauucuuguuaacaacuaaacgaacauguuuauuuucuuauuauuucuuacucucacuagugguagugaccuugaccggugcaccacuuuugaugauguucaagcuccuaauuacacucaacauacuucaucuaugagggggguuuacuauccugaugaaauuuuuagaucagacacucuuuauuuaacucaggauuuauuucuuccauuuuauucuaauguuacaggguuucauacuauuaaucauacguuuggcaacccugucauaccuuuuaaggaugguauuuauuuugcugccacagagaaaucaaauguuguccgugguuggguuuuugguucuaccaugaacaacaagucacagucggugauuauuauuaacaauucuacuaauguuguuauacgagcauguaacuuugaauugugugacaacccuuucuuugcuguuucuaaacccauggguacacagacacauacuaugauauucgauaaugcauuuaauugcacuuucgaguacauaucugaugccuuuucgcuugauguuucagaaaagucagguaauuuuaaacacuuacgagaguuuguguuuaaaaauaaagauggguuucucuauguuuauaagggcuaucaaccuauagauguaguucgugaucuaccuucugguuuuaacacuuugaaaccuauuuuuaaguugccucuugguauuaacauuacaaauuuuagagccauucuuacagccuuuucaccugcucaagacauuuggggcacgucagcugcagccuauuuuguuggcuauuuaaagccaacuacauuuaugcucaaguaugaugaaaaugguacaaucacagaugcuguugauuguucucaaaauccacuugcugaacucaaaugcucuguuaagagcuuugagauugacaaaggaauuuaccagaccucuaauuucaggguuguucccucaggagauguugugagauucccuaauauuacaaacuuguguccuuuuggagagguuuuuaaugcuacuaaauucccuucugucuaugcaugggagagaaaaaaaauuucuaauuguguugcugauuacucugugcucuacaacucaacauuuuuuucaaccuuuaagugcuauggcguuucugccacuaaguugaaugaucuuugcuucuccaaugucuaugcagauucuuuuguagucaagggagaugauguaagacaaauagcgccaggacaaacugguguuauugcugauuauaauuauaaauugccagaugauuucauggguuguguccuugcuuggaauacuaggaacauugaugcuacuucaacugguaauuauaauuauaaauauagguaucuuagacauggcaagcuuaggcccuuugagagagacauaucuaaugugccuuucuccccugauggcaaaccuugcaccccaccugcucuuaauuguuauuggccauuaaaugauuaugguuuuuacaccacuacuggcauuggcuaccaaccuuacagaguuguaguacuuucuuuugaacuuuuaaaugcaccggccacgguuuguggaccaaaauuauccacugaccuuauuaagaaccagugugucaauuuuaauuuuaauggacucacugguacugguguguuaacuccuucuucaaagagauuucaaccauuucaacaauuuggccgugauguuucugauuucacugauuccguucgagauccuaaaacaucugaaauauuagacauuucaccuugcgcuuuuggggguguaaguguaauuacaccuggaacaaaugcuucaucugaaguugcuguucuauaucaagauguuaacugcacugauguuucuacagcaauucaugcagaucaacucacaccagcuuggcgcauauauucuacuggaaacaauguauuccagacucaagcaggcugucuuauaggagcugagcaugucgacacuucuuaugagugcgacauuccuauuggagcuggcauuugugcuaguuaccauacaguuucuuuauuacguaguacuagccaaaaaucuauuguggcuuauacuaugucuuuaggugcugauaguucaauugcuuacucuaauaacaccauugcuauaccuacuaacuuuucaauuagcauuacuacagaaguaaugccuguuucuauggcuaaaaccuccguagauuguaauauguacaucugcggagauucuacugaaugugcuaauuugcuucuccaauaugguagcuuuugcacacaacuaaaucgugcacucucagguauugcugcugaacaggaucgcaacacacgugaaguguucgcucaagucaaacaaauguacaaaaccccaacuuugaaauauuuuggugguuuuaauuuuucacaaauauuaccugacccucuaaagccaacuaagaggucuuuuauugaggacuugcucuuuaauaaggugacacucgcugaugcuggcuucaugaagcaauauggcgaaugccuaggugauauuaaugcuagagaucucauuugugcgcagaaguucaauggacuuacaguguugccaccucugcucacugaugauaugauugcugccuacacugcugcucuaguuagugguacugccacugcuggauggacauuuggugcuggcgcugcucuucaaauaccuuuugcuaugcaaauggcauauagguucaauggcauuggaguuacccaaaauguucucuaugagaaccaaaaacaaaucgccaaccaauuuaacaaggcgauuagucaaauucaagaaucacuuacaacaacaucaacugcauugggcaagcugcaagacguuguuaaccagaaugcucaagcauuaaacacacuuguuaaacaacuuagcucuaauuuuggugcaauuucaagugugcuaaaugauauccuuucgcgacuugauaaagucgaggcggagguacaaauugacagguuaauuacaggcagacuucaaagccuucaaaccuauguaacacaacaacuaaucagggcugcugaaaucagggcuucugcuaaucuugcugcuacuaaaaugucugaguguguucuuggacaaucaaaaagaguugacuuuuguggaaagggcuaccaccuuauguccuucccacaagcagccccgcaugguguugucuuccuacaugucacguaugugccaucccaggagaggaacuucaccacagcgccagcaauuugucaugaaggcaaagcauacuucccucgugaagguguuuuuguguuuaauggcacuucuugguuuauuacacagaggaacuucuuuucuccacaaauaauuacuacagacaauacauuugucucaggaaauugugaugucguuauuggcaucauuaacaacacaguuuaugauccucugcaaccugagcuugacucauucaaagaagagcuggacaaguacuucaaaaaucauacaucaccagauguugaucuuggcgacauuucaggcauuaacgcuucugucgucaacauucaaaaagaaauugaccgccucaaugaggucgcuaaaaauuuaaaugaaucacucauugaccuucaagaauugggaaaauaugagcaauauauuaaauggccuugguauguuuggcucggcuucauugcuggacuaauugccaucgucaugguuacaaucuugcuuuguugcaugacuaguuguugcaguugccucaagggugcaugcucuugugguucuugcugcaaguuugaugaggaugacucugagccaguucucaagggugucaaauuacauuacacauaaacgaacuuauggauuuguuuaugagauuuuuuacucuuggaucaauuacugcacagccaguaaaaauugacaaugcuucuccugcaaguacuguucaugcuacagcaacgauaccgcuacaagccucacucccuuucggauggcuuguuauuggcguugcauuucuugcuguuuuucagagcgcuaccaaaauaauugcgcucaauaaaagauggcagcuagcccuuuauaagggcuuccaguucauuugcaauuuacugcugcuauuuguuaccaucuauucacaucuuuugcuugucgcugcagguauggaggcgcaauuuuuguaccucuaugccuugauauauuuucuacaaugcaucaacgcauguagaauuauuaugagauguuggcuuuguuggaagugcaaauccaagaacccauuacuuuaugaugccaacuacuuuguuugcuggcacacacauaacuaugacuacuguauaccauauaacagugucacagauacaauugucguuacugaaggugacggcauuucaacaccaaaacucaaagaagacuaccaaauuggugguuauucugaggauaggcacucagguguuaaagacuaugucguuguacauggcuauuucaccgaaguuuacuaccagcuugagucuacacaaauuacuacagacacugguauugaaaaugcuacauucuucaucuuuaacaagcuuguuaaagacccaccgaaugugcaaauacacacaaucgacggcucuucaggaguugcuaauccagcaauggauccaauuuaugaugagccgacgacgacuacuagcgugccuuuguaagcacaagaaagugaguacgaacuuauguacucauucguuucggaagaaacagguacguuaauaguuaauagcguacuucuuuuucuugcuuucgugguauucuugcuagucacacuagccauccuuacugcgcuucgauugugugcguacugcugcaauauuguuaacgugaguuuaguaaaaccaacgguuuacgucuacucgcguguuaaaaaucugaacucuucugaaggaguuccugaucuucuggucuaaacgaacuaacuauuauuauuauucuguuuggaacuuuaacauugcuuaucauggcagacaacgguacuauuaccguugaggagcuuaaacaacuccuggaacaauggaaccuaguaauagguuuccuauuccuagccuggauuauguuacuacaauuugccuauucuaaucggaacagguuuuuguacauaauaaagcuuguuuuccucuggcucuuguggccaguaacacuugcuuguuuugugcuugcugcugucuacagaauuaauugggugacuggcgggauugcgauugcaauggcuuguauuguaggcuugauguggcuuagcuacuucguugcuuccuucaggcuguuugcucguacccgcucaauguggucauucaacccagaaacaaacauucuucucaaugugccucuccgggggacaauugugaccagaccgcucauggaaagugaacuugucauuggugcugugaucauucguggucacuugcgaauggccggacacucccuagggcgcugugacauuaaggaccugccaaaagagaucacuguggcuacaucacgaacgcuuucuuauuacaaauuaggagcgucgcagcguguaggcacugauucagguuuugcugcauacaaccgcuaccguauuggaaacuauaaauuaaauacagaccacgccgguagcaacgacaauauugcuuugcuaguacaguaagugacaacagauguuucaucuuguugacuuccagguuacaauagcagagauauugauuaucauuaugaggacuuucaggauugcuauuuggaaucuugacguuauaauaaguucaauagugagacaauuauuuaagccucuaacuaagaagaauuauucggaguuagaugaugaagaaccuauggaguuagauuauccauaaaacgaacaugaaaauuauucucuuccugacauugauuguauuuacaucuugcgagcuauaucacuaucaggaguguguuagagguacgacuguacuacuaaaagaaccuugcccaucaggaacauacgagggcaauucaccauuucacccucuugcugacaauaaauuugcacuaacuugcacuagcacacacuuugcuuuugcuugugcugacgguacucgacauaccuaucagcugcgugcaagaucaguuucaccaaaacuuuucaucagacaagaggagguucaacaagagcucuacucgccacuuuuucucauuguugcugcucuaguauuuuuaauacuuugcuucaccauuaagagaaagacagaaugaaugagcucacuuuaauugacuucuauuugugcuuuuuagccuuucugcuauuccuuguuuuaauaaugcuuauuauauuuugguuuucacucgaaauccaggaucuagaagaaccuuguaccaaagucuaaacgaacaugaaacuucucauuguuuugacuuguauuucucuaugcaguugcauaugcacuguaguacagcgcugugcaucuaauaaaccucaugugcuugaagauccuuguaagguacaacacuagggguaauacuuauagcacugcuuggcuuugugcucuaggaaagguuuuaccuuuucauagauggcacacuaugguucaaacaugcacaccuaauguuacuaucaacugucaagauccagcugguggugcgcuuauagcuagguguugguaccuucaugaaggucaccaaacugcugcauuuagagacguacuuguuguuuuaaauaaacgaacaaauuaaaaugucugauaauggaccccaaucaaaccaacguagugccccccgcauuacauuugguggacccacagauucaacugacaauaaccagaauggaggacgcaauggggcaaggccaaaacagcgccgaccccaagguuuacccaauaauacugcgucuugguucacagcucucacucagcauggcaaggaggaacuuagauucccucgaggccagggcguuccaaucaacaccaauagugguccagaugaccaaauuggcuacuaccgaagagcuacccgacgaguucgugguggugacggcaaaaugaaagagcucagccccagaugguacuucuauuaccuaggaacuggcccagaagcuucacuucccuacggcgcuaacaaagaaggcaucguauggguugcaacugagggagccuugaauacacccaaagaccacauuggcacccgcaauccuaauaacaaugcugccaccgugcuacaacuuccucaaggaacaacauugccaaaaggcuucuacgcagagggaagcagaggcggcagucaagccucuucucgcuccucaucacguagucgcgguaauucaagaaauucaacuccuggcagcaguaggggaaauucuccugcucgaauggcuagcggagguggugaaacugcccucgcgcuauugcugcuagacagauugaaccagcuugagagcaaaguuucugguaaaggccaacaacaacaaggccaaacugucacuaagaaaucugcugcugaggcaucuaaaaagccucgccaaaaacguacugccacaaaacaguacaacgucacucaagcauuugggagacgugguccagaacaaacccaaggaaauuucggggaccaagaccuaaucagacaaggaacugauuacaaacauuggccgcaaauugcacaauuugcuccaagugccucugcauucuuuggaaugucacgcauuggcauggaagucacaccuucgggaacauggcugacuuaucauggagccauuaaauuggaugacaaagauccacaauucaaagacaacgucauacugcugaacaagcacauugacgcauacaaaacauucccaccaacagagccuaaaaaggacaaaaagaaaaagacugaugaagcucagccuuugccgcagagacaaaagaagcagcccacugugacucuucuuccugcggcugacauggaugauuucuccagacaacuucaaaauuccaugaguggagcuucugcugauucaacucaggcauaaacacucaugaugaccacacaaggcagaugggcuauguaaacguuuucgcaauuccguuuacgauacauagucuacucuugugcagaaugaauucucguaacuaaacagcacaaguagguuuaguuaacuuuaaucucacauagcaaucuuuaaucaauguguaacauuagggaggacuugaaagagccaccacauuuucaucgaggccacgcggaguacgaucgaggguacagugaauaaugcuagggagagcugccuauauggaagagcccuaauguguaaaauuaauuuuaguagugcuauccccaugugauuuuaauagcuucuuaggagaaugacaaaaaaaaaaaaaaaaaaaaaaaa

SEQ ID NO: 3394 - RNA, 14 nt, Artificial Sequence
  Synthetic
auauaucuauuucg

SEQ ID NO: 3395 - RNA, 14 nt, Artificial Sequence
  Synthetic
cgaaauaguauaua

SEQ ID NO: 3396 - RNA, 22 nt, Artificial Sequence
  Synthetic
cgaaauaguauauacuauuucg

SEQ ID NO: 3397 - DNA, 24 bp, Artificial Sequence
  Synthetic
  misc_feature (1)..(22): ribonucleotide
cgaaauagauauaucuauuucgtt
